(19) United States
(12) Patent Application Publication
(10) Pub. No.: US 2021/0284712 A1
(43) Pub. Date: Sep. 16, 2021

(54) MULTIMERIC T-CELL MODULATORY POLYPEPTIDES AND METHODS OF USE THEREOF

(71) Applicant: Cue Biopharma, Inc., Cambridge, MA (US)

(72) Inventors: Ronald D. Seidel, III, Cambridge, MA (US); Rodolfo J. Chaparro, Cambridge, MA (US)

(21) Appl. No.: 17/246,005

(22) Filed: Apr. 30, 2021

Related U.S. Application Data
(63) Continuation of application No. PCT/US19/67278, filed on Dec. 18, 2019.
(60) Provisional application No. 62/814,691, filed on Mar. 6, 2019.
(60) Provisional application No. 62/782,176, filed on Dec. 19, 2018.

(51) Int. Cl. C07K 14/74; C07K 16/08; C07K 16/28; C12N 5/00

(52) U.S. Cl. CPC C07K 14/70539; C07K 16/084; C07K 16/2818; A61K 38/00; C12N 5/0087; C07K 2319/33; C07K 16/2827

(57) ABSTRACT

The present disclosure provides T-cell modulatory multimeric polypeptides that comprise an immunomodulatory polypeptide and that comprise an epitope-presenting a human papillomavirus (HPV) peptide. A T-cell modulatory, multimeric polypeptide is useful for modulating the activity of a T cell, and for modulating an immune response in an individual.

### CROSS-REFERENCE

[0001] This application claims the benefit of U.S. Provisional Patent Application No. 62/782,176, filed Dec. 19, 2018, and U.S. Provisional Patent Application No. 62/814,691, filed Mar. 6, 2019, which applications are incorporated herein by reference in their entirety.

### INTRODUCTION

[0002] An adaptive immune response involves the engagement of the T cell receptor (TCR), present on the surface of a T cell, with a small peptide antigen non-covalently presented on the surface of an antigen presenting cell (APC) by a major histocompatibility complex (MHC; also referred to in humans as a human leukocyte antigen (VILA) complex). This engagement represents the immune system's targeting mechanism and is a requisite molecular interaction for T cell modulation (activation or inhibition) and effector function. Following epitope-specific cell targeting, the targeted T cells are activated through engagement of costimulatory proteins found on the APC with counterpart costimulatory proteins the T cells. Both signals—epitope/TCR binding and engagement of APC costimulatory proteins with T cell costimulatory proteins—are required to drive T cell specificity and activation or inhibition. The TCR is specific for a given epitope; however, the costimulatory protein not epitope specific and instead is generally expressed on all T cells or on large T cell subsets.

### SUMMARY

[0003] The present disclosure provides T-cell modulatory multimeric polypeptides (TMMPs) that comprise an immunomodulatory polypeptide that exhibits reduced binding affinity to a cognate co-immunomodulatory polypeptide. A TMMP is useful for modulating the activity of a T cell, and for modulating an immune response in an individual.

### BRIEF DESCRIPTION OF THE DRAWINGS

[0004] FIG. 1A-1F are schematic depictions of various TMMPs of the present disclosure.

[0005] FIG. 2A-2F are schematic depictions of various disulfide-linked TMMPs of the present disclosure.

[0006] FIG. 3A-3B provides an amino acid sequence of an HPV E6 polypeptide (FIG. 3A; SEQ ID NO: 449) and an HPV E7 polypeptide (FIG. 3B; SEQ ID NO: 450).

[0007] FIG. 4A-4G provide amino acid sequences of exemplary polypeptide chains of TMMPs of the present disclosure. The sequences of the exemplary polypeptide chains are set forth in SEQ ID NOs: 451-457. Epitope sequences are set forth as follows: FIG. 4D: VYDFAFRDL (SEQ ID NO: 473); FIG. 4E: RAHYNIVTF (SEQ ID NO: 480); FIG. 4F: CDSTLRLCV (SEQ ID NO: 481); FIG. 4G: LCVQSTHVDI (SEQ ID NO: 482).

[0008] FIG. 5A-5G provide amino acid sequences of immunoglobulin Fc polypeptides. The sequences are set forth in SEQ ID NOs: 458-469, respectively.

[0009] FIG. 6 provides a multiple amino acid sequence alignment of beta-2 microglobulin (β2M) precursors (i.e., including the leader sequence) from Homo sapiens (NP_004039.1; SEQ ID NO:19), Pan troglodytes (NP_001009066.1; SEQ ID NO:19), Macaca mulatto (NP_001040602.1; SEQ ID NO:20), Bos taurus (NP_776318.1; SEQ ID NO:21) and Mus musculus (NP_033865.2; SEQ ID NO:22). Amino acids 1-20 are a signal peptide.

[0010] FIG. 7A-7C provide amino acid sequences of full-length human HLA heavy chains of alleles A*0101 (SEQ ID NO: 23), A*1101 (SEQ ID NO: 24), A*2402 (SEQ ID NO: 25), and A*3303 (SEQ ID NO: 26) (FIG. 7A); full-length human HLA heavy chain of allele B*0702 (SEQ ID NO: 27) (FIG. 7B); and a full-length human HLA-C heavy chain (SEQ ID NO: 28) (FIG. 7C).

[0011] FIG. 8 provides an alignment of eleven mature MHC class I heavy chain amino acid sequences without their leader sequences, transmembrane domains, and intracellular domains. Top to bottom: SEQ ID NOs: 41-51.

[0012] FIGS. 9A-9B provide an alignment of HLA-A heavy chain amino acid sequences (FIG. 9A; SEQ ID NOs: 198-206, respectively) and a consensus sequence (FIG. 9B; SEQ ID NO: 29).

[0013] FIGS. 10A-10B provide an alignment of HLA-B heavy chain amino acid sequences (FIG. 10A; SEQ ID NOs: 207-213, respectively) and a consensus sequence (FIG. 10B; SEQ ID NO: 30).

[0014] FIGS. 11A-11B provide an alignment of HLA-G heavy chain amino acid sequences (FIG. 11A; SEQ ID NOs: 214-222, respectively) and a consensus sequence (FIG. 11B; SEQ ID NO: 31).

[0015] FIG. 12 provides a consensus amino acid sequence for each of HLA-E, —F, and -G heavy chains (SEQ ID NOs: 32-34, respectively). Variable amino acid (aa) positions are indicated as “X” residues sequentially numbered; the locations of amino acids 84, 139, and 236 are double underlined.

[0016] FIG. 13 provides an alignment of consensus amino acid sequences for HLA-A (SEQ ID NO: 35), -B (SEQ ID NO: 36), -C(SEQ ID NO: 37), -E (SEQ ID NO: 38). -F (SEQ ID NO: 39), and -G (SEQ ID NO: 40).

[0017] FIG. 14A-14D provide schematic depictions of multiple disulfide-linked TMMP of the present disclosure.

[0018] FIG. 15A-15C provide schematic depictions of examples of configurations of disulfide-linked TMMPs of the present disclosure.

[0019] FIG. 16 provide schematic depictions of examples of positions of immunomodulatory polypeptides in TMMPs of the present disclosure.

### DEFINITIONS

[0020] The terms “polynucleotide” and “nucleic acid,” used interchangeably herein, refer to a polymeric form of nucleotides of any length, either ribonucleotides or deoxyribonucleotides. Thus, this term includes, but is not limited to, single-, double-, or multi-stranded DNA or RNA, genomic DNA, cDNA, DNA-RNA hybrids, or a polymer comprising purine and pyrimidine bases or other natural, chemically or biochemically modified, non-natural, or derivatized nucleotide bases.

[0021] The terms “peptide,” “polypeptide,” and “protein” are used interchangeably herein, and refer to a polymeric form of amino acids of any length, which can include coded and non-coded amino acids, chemically or biochemically modified or derivatized amino acids, and polypeptides having modified peptide backbones.

[0022] A polynucleotide or polypeptide has a certain percent “sequence identity” to another polynucleotide or polypeptide, meaning that, when aligned, that percentage of bases or amino acids are the same, and in the same relative position, when comparing the two sequences. Sequence identity can be determined in a number of different ways. To determine sequence identity, sequences can be aligned using various convenient methods and computer programs (e.g., BLAST, T-COFFEE, MUSCLE, MAFFT, etc.), available over the world wide web at sites including ncbi.nlm.nili.gov/BLAST, ebi.ac.uk/Tools/msa/teoffee/, ebi.ac.uk/Tools/msa/musele/, mafficbrc.jp/alignment/software/. See, e.g., Altschul et al. (1990), J. Mol. Bioi. 215:403-10.

[0023] The term “conservative amino acid substitution” refers to the interchangeability in proteins of amino acid residues having similar side chains. For example, a group of amino acids having aliphatic side chains consists of glycine, alanine, valine, leucine, and isoleucine; a group of amino acids having aliphatic-hydroxyl side chains consists of serine and threonine; a group of amino acids having amide containing side chains consisting of asparagine and glutamine; a group of amino acids having aromatic side chains consists of phenylalanine, tyrosine, and tryptophan; a group of amino acids having basic side chains consists of lysine, arginine, and histidine; a group of amino acids having acidic side chains consists of glutamate and aspartate; and a group of amino acids having sulfur containing side chains consists of cysteine and methionine. Exemplary conservative amino acid substitution groups are: valine-leucine-isoleucine, phenylalanine-tyrosine, lysine-arginine, alanine-valine-glycine, and asparagine-glutamine.

[0024] The term “immunological synapse” or “immune synapse” as used herein generally refers to the natural interface between two interacting immune cells of an adaptive immune response including, e.g., the interface between an antigen-presenting cell (APC) or target cell and an effector cell, e.g., a lymphocyte, an effector T cell, a natural killer cell, and the like. An immunological synapse between an APC and a T cell is generally initiated by the interaction of a T cell antigen receptor and major histocompatibility complex molecules, e.g., as described in Bromley et al., Annu Rev Immunol. 2001; 19:375-96; the disclosure of which is incorporated herein by reference in its entirety.

[0025] “T cell” includes all types of immune cells expressing CD3, including T-helper cells (CD4⁺ cells), cytotoxic T-cells (CD8⁺ cells), T-regulatory cells (Treg), and NK-T cells.

[0026] The term “immunomodulatory polypeptide” (also referred to as a “co-stimulatory polypeptide”), as used herein, includes a polypeptide on an antigen presenting cell (APC) (e.g., a dendritic cell, a B cell, and the like) that specifically binds a cognate co-immunomodulatory polypeptide on a T cell, thereby providing a signal which, in addition to the primary signal provided by, for instance, binding of a TCR/CD3 complex with a major histocompatibility complex (MHC) polypeptide loaded with peptide, mediates a T cell response, including, but not limited to, proliferation, activation, differentiation, and the like. An immunomodulatory polypeptide can include, but is not limited to, CD7, B7-1 (CD80), B7-2 (CD86), PD-L1, PD-L2, 4-1BBL, OX40L, Fas ligand (FasL), inducible costimulatory ligand (ICOS-L), intercellular adhesion molecule (1CAM), CD301 . . . , CD40, CD70, CD83, HLA-G, MICA, MICU, HVEM, lymphotoxin beta receptor, 3/TR6, ILT3, ILT4, HVEM, an agonist or antibody that binds Toll ligand receptor and a ligand that specifically binds with B7-113.

[0027] As noted above, an “immunomodulatory polypeptide” (also referred to herein as a “MOD”) specifically binds a cognate co-immunomodulatory polypeptide on a T cell.

[0028] An “immunomodulatory domain” (“MOD”) of a TMMP of the present disclosure binds a cognate co-immunomodulatory polypeptide, which may be present on a target T cell.

[0029] “Heterologous,” as used herein, means a nucleotide or polypeptide that is not found in the native nucleic acid or protein, respectively.

[0030] “Recombinant,” as used herein, means that a particular nucleic acid (DNA or RNA) is the product of various combinations of cloning, restriction, polymerase chain reaction (PCR) and/or ligation steps resulting in a construct having a structural coding or non-coding sequence distinguishable from endogenous nucleic acids found in natural systems. DNA sequences encoding polypeptides can be assembled from cDNA fragments or from a series of synthetic oligonucleotides, to provide a synthetic nucleic acid which is capable of being expressed from a recombinant transcriptional unit contained in a cell or in a cell-free transcription and translation system.

[0031] The terms “recombinant expression vector,” or “DNA construct” are used interchangeably herein to refer to a DNA molecule comprising a vector and at least one insert. Recombinant expression vectors are usually generated for the purpose of expressing and/or propagating the insert(s), or for the construction of other recombinant nucleotide sequences. The insert(s) may or may not be operably linked to a promoter sequence and may or may not be operably linked to DNA regulatory sequences.

[0032] As used herein, the term “affinity” refers to the equilibrium constant for the reversible binding of two agents (e.g., an antibody and an antigen) and is expressed as a dissociation constant (RD). Affinity can be at least 1-fold greater, at least 2-fold greater, at least 3-fold greater, at least 4-fold greater, at least 5-fold greater, at least 6-fold greater, at least 7-fold greater, at least 8-fold greater, at least 9-fold greater, at least 10-fold greater, at least 20-fold greater, at least 30-fold greater, at least 40-fold greater, at least 50-fold greater, at least 60-fold greater, at least 70-fold greater, at least 80-fold greater, at least 90-fold greater, at least 100-fold greater, or at least 1,000-fold greater, or more, than the affinity of an antibody for unrelated amino acid sequences. Affinity of an antibody to a target protein can be, for example, from about 100 nanomolar (nM) to about 0.1 nM, from about 100 nM to about 1 picomolar (pM), or from about 100 nM to about 1 femtomolar (fM) or more. As used herein, the term “avidity” refers to the resistance of a complex of two or more agents to dissociation after dilution. The terms “immunoreactive” and “preferentially binds” are used interchangeably herein with respect to antibodies and/or antigen-binding fragments.

[0033] The term “binding,” as used herein (e.g. with reference to binding of a TMMP to a polypeptide (e.g., a T-cell receptor) on a T cell), refers to a non-covalent interaction between two molecules. Non-covalent binding refers to a direct association between two molecules, due to, for example, electrostatic, hydrophobic, ionic, and/or hydrogen-bond interactions, including interactions such as salt bridges and water bridges. Non-covalent binding interactions are generally characterized by a dissociation constant (K_{D}) of less than 10⁻⁶M, less than 10⁻⁷ M, less than 10⁻⁸ M, less than 10⁻⁹ M, less than 10⁻¹⁰ M, less than 10⁻¹¹M, less than 10⁻¹² M, less than 10⁻¹³ M, less than 10⁻¹⁴ M, or less than 10⁻¹⁵ M. “Affinity” refers to the strength of non-covalent binding, increased binding affinity being correlated with a lower K_{D}. “Specific binding” generally refers to binding with an affinity of at least about 10⁻⁷ M or greater, e.g., 5×10⁻⁷ M, 10⁻⁸ M, 5×10⁻⁸M, 10⁻⁹ M. and greater. “Non-specific binding” generally refers to binding (e.g., the binding of a ligand to a moiety other than its designated binding site or receptor) with an affinity of less than about 10⁻⁷ M (e.g., binding with an affinity of 10⁻⁶ M, 10⁻⁵ M, 10⁻⁴ M). However, in some contexts, e.g., binding between a TCR and a peptide/MBC complex, “specific binding” can be in the range of from 1 μM to 100 μM, or from 100 μM to 1 mM. “Covalent binding” or “covalent bond,” as used herein, refers to the formation of one or more covalent chemical binds between two different molecules.

[0034] The terms “treatment”, “treating” and the like are used herein to generally mean obtaining a desired pharmacologic and/or physiologic effect. The effect may be prophylactic in terms of completely or partially preventing a disease or symptom thereof and/or may be therapeutic in terms of a partial or complete cure for a disease and/or adverse effect attributable to the disease. “Treatment” as used herein covers any treatment of a disease or symptom in a mammal, and includes: (a) preventing the disease or symptom from occurring in a subject which may be predisposed to acquiring the disease or symptom but has not yet been diagnosed as having it; (h) inhibiting the disease or symptom, i.e., arresting its development; and/or (c) relieving the disease, i.e., causing regression of the disease. The therapeutic agent may be administered before, during or after the onset of disease or injury. The treatment of ongoing disease, where the treatment stabilizes or reduces the undesirable clinical symptoms of the patient, is of particular interest. Such treatment is desirably performed prior to complete loss of function in the affected tissues. The subject therapy will desirably be administered during the symptomatic stage of the disease, and in some cases after the symptomatic stage of the disease.

[0035] The terms “individual,” “subject,” “host,” and “patient,” are used interchangeably herein and refer to any mammalian subject for whom diagnosis, treatment, or therapy is desired. Mammals include, e.g., humans, non-human primates, rodents (e.g., rats; mice), lagomorphs (e.g., rabbits), ungulates (e.g., cows, sheep, pigs, horses, goats, and the like), etc.

[0036] Before the present invention is further described, it is to be understood that this invention is not limited to particular embodiments described, as such may, of course, vary. It is also to be understood that the terminology used herein is for the purpose of describing particular embodiments only, and is not intended to be limiting, since the scope of the present invention will be limited only by the appended claims.

[0037] Where a range of values is provided, it is understood that each intervening value, to the tenth of the unit of the lower limit unless the context clearly dictates otherwise, between the upper and lower limit of that range and any other stated or intervening value in that stated range, is encompassed within the invention. The upper and lower limits of these smaller ranges may independently be included in the smaller ranges, and are also encompassed within the invention, subject to any specifically excluded limit in the stated range. Where the stated range includes one or both of the limits, ranges excluding either or both of those included limits are also included in the invention.

[0038] Unless defined otherwise, all technical and scientific terms used herein have the same meaning as commonly understood by one of ordinary skill in the art to which this invention belongs. Although any methods and materials similar or equivalent to those described herein can also be used in the practice or testing of the present invention, the preferred methods and materials are now described. All publications mentioned herein are incorporated herein by reference to disclose and describe the methods and/or materials in connection with which the publications are cited.

[0039] It must be noted that as used herein and in the appended claims, the singular forms “a,” “an,” and “the” include plural referents unless the context clearly dictates otherwise. Thus, for example, reference to a “T-cell modulatory multimeric polypeptide” includes a plurality of such polypeptides and reference to “the immunomodulatory polypeptide” includes reference to one or more immunomodulatory polypeptides and equivalents thereof known to those skilled in the art, and so forth. It is further noted that the claims may be drafted to exclude any optional element. As such, this statement is intended to serve as antecedent basis for use of such exclusive terminology as “solely,” “only” and the like in connection with the recitation of claim elements, or use of a “negative” limitation.

[0040] It is appreciated that certain features of the invention, which are, for clarity, described in the context of separate embodiments, may also be provided in combination in a single embodiment. Conversely, various features of the invention, which are, for brevity, described in the context of a single embodiment, may also be provided separately or in any suitable sub-combination. All combinations of the embodiments pertaining to the invention are specifically embraced by the present invention and are disclosed herein just as if each and every combination was individually and explicitly disclosed. In addition, all sub-combinations of the various embodiments and elements thereof are also specifically embraced by the present invention and are disclosed herein just as if each and every such sub-combination was individually and explicitly disclosed herein.

[0041] The publications discussed herein are provided solely for their disclosure prior to the filing date of the present application. Nothing herein is to be construed as an admission that the present invention is not entitled to antedate such publication by virtue of prior invention. Further, the dates of publication provided may be different from the actual publication dates which may need to be independently confirmed.

### DETAILED DESCRIPTION

[0042] The present disclosure provides T-cell modulatory multimeric poly peptides that comprise an immunomodulatory polypeptide and that comprise an epitope-presenting human papillomavirus (HPV) peptide. A TMMP is useful for modulating the activity of a T cell, and for modulating an immune response in an individual.

### T-Cell Modulatory Multimeric Polypeptides

[0043] The present disclosure provides a T-cell modulatory multimeric polypeptide (TMMP) comprising: a) a first polypeptide; and h) a second polypeptide, wherein the TMMP comprises an epitope; a first major histocompatibility complex (MHC) polypeptide; a second MHC polypeptide; one or more immunomodulatory polypeptides; and optionally an immunoglobulin (Ig) Fc polypeptide or a non-Ig scaffold. The present disclosure provides a TMMP, wherein the TMMP is a heterodimer comprising: a) a first polypeptide comprising a first MHC polypeptide; and b) a second polypeptide comprising a second MHC polypeptide, wherein the first polypeptide or the second polypeptide comprises an epitope (e.g., a peptide that presents an epitope); wherein the first polypeptide and/or the second polypeptide comprises one or more immunomodulatory polypeptides that can be the same or different; and optionally an Ig F c polypeptide or a non-Ig scaffold. A TMMP of the present disclosure is also referred to herein as a “multimeric polypeptide of the present disclosure” or a “synTac.” In some cases, the peptide epitope present in a TMMP of the present disclosure is human Papillomavirus (HPV) peptide.

[0044] The present disclosure provides a TMMP comprising a heterodimeric polypeptide comprising: a) a first polypeptide comprising: i) a peptide epitope; and ii) a first MHC polypeptide; b) second polypeptide comprising a second MHC polypeptide; and c) at least one immunomodulatory polypeptide, where the first and/or the second polypeptide comprises the at least one (i.e., one or more) immunomodulatory polypeptide. Optionally, the first or the second polypeptide comprises an Ig Fc polypeptide or a non-Ig scaffold. At least one of the one or more immunomodulatory polypeptides is a variant immunomodulatory polypeptide that exhibits reduced affinity to a cognate co-immunomodulatory polypeptide compared to the affinity of a corresponding wild-type immunomodulatory polypeptide for the cognate co-immunomodulatory polypeptide. The epitope present in a TMMP of the present disclosure binds to a T-cell receptor (TCR) on a T cell with an affinity of at least 100 μM (e.g., at least 10 μM, at least 1 μM, at least 100 nM, at least 10 nM, or at least 1 nM). A TMMP of the present disclosure binds to a first T cell with an affinity that is at least 25% higher than the affinity with which the TMMP binds a second T cell, where the first T cell expresses on its surface the cognate co-immunomodulatory polypeptide and a TCR that binds the epitope with an affinity of at least 100 nM, and where the second T cell expresses on its surface the cognate co-immunomodulatory polypeptide hut does not express on its surface a TCR that binds the epitope with an affinity of at least 100 μM (e.g., at least 10 μM, at least 1 nM, at least 100 nM, at least 10 nM, or at least 1 nM). In some cases, the peptide epitope present in a TMMP of the present disclosure is a human papilloma virus (HPV) peptide.

[0045] The present disclosure provides a TMMP, wherein the TMMP is:

[0046] A) a heterodimer comprising: a) a first polypeptide comprising a first MHC polypeptide; and b) a second polypeptide comprising a second MHC polypeptide, wherein the first polypeptide or the second polypeptide comprises an epitope; wherein the first polypeptide and/or the second polypeptide comprises one or more immunomodulatory polypeptides that can be the same or different, and wherein at least one of the one or more immunomodulatory polypeptides may be a wild-type immunomodulatory polypeptide or a variant of a wild-type immunomodulatory polypeptide, wherein the variant immunomodulatory polypeptide comprises 1, 2, 3, 4, 5, 6, 7, 8, 9.10, 11, 12, 13, 14, 15, 16, 17, 18, 19, or 20 amino acid substitutions compared to the amino acid sequence of the corresponding wild-type immunomodulatory polypeptide; and wherein the first polypeptide or the second polypeptide optionally comprises an Ig Fc polypeptide or a non-Ig scaffold; or

[0047] B) a heterodimer comprising: a) a first polypeptide comprising a first MEW polypeptide; and b) a second polypeptide comprising a second MHC polypeptide, wherein the first polypeptide or the second polypeptide comprises an epitope; wherein the first polypeptide and/or the second polypeptide comprises one or more immunomodulatory polypeptides that can be the same or different,

[0048] wherein at least one of the one or more immunomodulatory polypeptides is a variant of a wild-type immunomodulatory polypeptide, wherein the variant immunomodulatory polypeptide comprises 1, 2, 3, 4, 5, 6, 7, 8, 9, 10, 11, 12, 13, 14, 15, 16, 17, 18, 19, or 20 amino acid substitutions compared to the amino acid sequence of the corresponding wild-type immunomodulatory polypeptide,

[0049] wherein at least one of the one or more immunomodulatory domains is a variant immunomodulatory polypeptide that exhibits reduced affinity to a cognate co-immunomodulatory polypeptide compared to the affinity of a corresponding wild-type immunomodulatory polypeptide for the cognate co-immunomodulatory polypeptide, and wherein the epitope binds to a TCR on a T cell with an affinity of at least 10⁻⁷ M, such that: i) the TMMP polypeptide binds to a first T cell, with an affinity that is at least 25% higher than the affinity with which the TMMP binds a second T cell, wherein the first T cell expresses on its surface the cognate co-immunomodulatory polypeptide and a TCR that binds the epitope with an affinity of at least 10⁻⁷ M, and wherein the second T cell expresses on its surface the cognate co-immunomodulatory polypeptide hut does not express on its surface a TCR that binds the epitope with an affinity of at least 10⁻⁷M; and/or ii) the ratio of the binding affinity of a control TMMP, wherein the control comprises a wild-type immunomodulatory polypeptide, to a cognate co-immunomodulatory polypeptide to the binding affinity of the TMMP comprising a variant of the wild-type immunomodulatory polypeptide to the cognate co-immunomodulatory polypeptide, when measured by bio-layer interferometry, is in a range of from 1.5:1 to 10⁶:1; and wherein the variant immunomodulatory polypeptide comprises 1, 2, 3, 4, 5, 6, 7, 8, 9, 10, 11, 12, 13, 14, 15, 16, 17, 18, 19, or 20 amino acid substitutions compared to the amino acid sequence of the corresponding wild-type immunomodulatory polypeptide; and

[0050] wherein the first polypeptide or the second polypeptide optionally comprises an Ig Fe polypeptide or a non-Ig scaffold; or

[0051] C) a heterodimer comprising: a) a first polypeptide comprising, in order from N-terminus to C-terminus: i) an epitope; ii) a first MHC polypeptide; and b) a second polypeptide comprising, in order from N-terminus to C-terminus: i) a second MC polypeptide; and ii) optionally an immunoglobulin (Ig) Fe polypeptide or a non-Ig scaffold, wherein the TMMP comprises one or more immunomodulatory domains that can be the same or different, wherein at least one of the one or more immunomodulatory domain is: A) at the C-terminus of the first polypeptide; B) at the N-terminus of the second polypeptide; C) at the C-terminus of the second polypeptide; or 1)) at the C-terminus of the first polypeptide and at the N-terminus of the second polypeptide, and wherein at least one of the one or more immunomodulatory domains may be a wild-type immunomodulatory polypeptide or a variant of a wild-type immunomodulatory polypeptide, wherein the variant immunomodulatory polypeptide comprises 1, 2, 3, 4, 5, 6, 7, 8, 9, 10, 11, 12, 13, 14, 15, 16, 17, 18, 19, or 20 amino acid substitutions compared to the amino acid sequence of the corresponding wild-type immunomodulatory polypeptide; and

[0052] optionally wherein at least one of the one or more immunomodulatory domains is a variant immunomodulatory polypeptide that exhibits reduced affinity to a cognate co-immunomodulatory polypeptide compared to the affinity of a corresponding wild-type immunomodulatory polypeptide for the cognate co-immunomodulatory polypeptide, and wherein the epitope binds to a TCR on a T cell with an affinity of at least 10⁻⁷ M, such that: i) the TMMP binds to a first T cell with an affinity that is at least 25% higher than the affinity with which the TMMP binds a second T cell, wherein the first T cell expresses on its surface the cognate co-immunomodulatory polypeptide and a TCR that binds the epitope with an affinity of at least 10⁻⁷M, and wherein the second T cell expresses on its surface the cognate co-immunomodulatory polypeptide but does not express on its surface a TCR that binds the epitope with an affinity of at least 10⁻⁷ M; and/or ii) the ratio of the binding affinity of a control TMMP, wherein the control comprises a wild-type immunomodulatory polypeptide, to a cognate co-immunomodulatory polypeptide to the binding affinity of the TMMP comprising a variant of the wild-type immunomodulatory polypeptide to the cognate co-immunomodulatory polypeptide, when measured by bio-layer interferometry, is in a range of from 1.5:1 to 10⁶:1; and wherein the variant immunomodulatory polypeptide comprises 1, 2, 3, 4, 5, 6, 7, 8, 9, 10, 11, 12, 13, 14, 15, 16, 17, 18, 19, or 20 amino acid substitutions compared to the amino acid sequence of the corresponding wild-type immunomodulatory polypeptide. In some cases, the peptide epitope present in a TMMP of the present disclosure is an HPV peptide.

[0053] The present disclosure provides a TMMP comprising: a) a first polypeptide comprising, in order from N-terminus to C-terminus: i) an epitope; ii) a first MHC polypeptide; and b) a second polypeptide comprising, in order from N-terminus to C-terminus: i) a second MIX polypeptide; and ii) optionally an Ig Fc polypeptide or a non-Ig scaffold. A TMMP of the present disclosure comprises one or more immunomodulatory polypeptides, wherein at least one of the one or more immunomodulatory polypeptides is: A) at the C-terminus of the first polypeptide; B) at the N-terminus of the second polypeptide; C) at the C-terminus of the second polypeptide; or D) at the C-terminus of the first polypeptide and at the N-terminus of the second polypeptide. At least one of the one or more immunomodulatory polypeptides is a variant immunomodulatory polypeptide that exhibits reduced affinity to a cognate co-immunomodulatory polypeptide compared to the affinity of a corresponding wild-type immunomodulatory polypeptide for the cognate co-immunomodulatory polypeptide. The epitope present in a TMMP of the present disclosure binds to a T-cell receptor (TCR) on a T cell with an affinity of at least 100 μM (e.g., at least 10 μM, at least 1 μM, at least 100 nM, at least 10 nM, or at least 1 nM). A TMMP of the present disclosure binds to a first T cell with an affinity that is at least 25% higher than the affinity with which the TMMP binds a second T cell, where the first T cell expresses on its surface the cognate co-immunomodulatory polypeptide and a TCR that binds the epitope with an affinity of at least 100 μM, and where the second T cell expresses on its surface the cognate co-immunomodulatory polypeptide but does not express on its surface a TCR that binds the epitope with an affinity of at least 100 μM (e.g., at least 10 μM, at least 1 μM, at least 100 nM, at least 10 nM, or at least 1 nM).

[0054] In some cases, the epitope present in a TMMP of the present disclosure binds to a TCR on a T cell with an affinity of from about 10⁻⁴ M to about 5×10⁻⁴ M, from about 5×10⁻⁴ M to about 10⁻⁵ M, from about 10⁻⁵M to 5×10⁻⁵ M, from about 5×10⁻⁵ M to 10⁻⁶ M, from about 10⁻⁶ M to about 5×10⁻⁶ M, from about 5×10⁻⁶ M to about 10⁻⁷ M, from about 10⁻⁷ M to about 5×10⁻⁷M, from about 5×10⁻⁷ M to about 10⁻⁸ M, or from about 10⁻⁸ M to about 10⁻⁹ M. Expressed another way, in some cases, the epitope present in a TMMP of the present disclosure binds to a TCR on a T cell with an affinity of from about 1 nM to about 5 nM, from about 5 nM to about 10 nM, from about 10 nM to about 50 nM, from about 50 nM to about 100 nM, from about 0.1 μM to about 0.5 μM, from about 0.5 μM to about 1 μM, from about 1 nM to about 5 μM, from about 5 μM to about 10 μM, from about 10 μM to about 25 μM, from about 25 μM to about 50 μM, from about 50 μM to about 75 μM, from about 75 μM to about 100 μM.

[0055] An immunomodulatory polypeptide present in a TMMP of the present disclosure binds to its cognate co-immunomodulatory polypeptide with an affinity that it at least 0.10% less, at least 15% less, at least 20% less, at least 25% less, at least 30% less, at least 35% less, at least 40% less, at least 45% less, at least 50% less, at least 55% less, at least 60% less, at least 65% less, at least 70% less, at least 75% less, at least 80% less, at least 85% less, at least 90% less, at least 95% less, or more than 95% less, than the affinity of a corresponding wild-type immunomodulatory polypeptide for the cognate co-immunomodulatory polypeptide.

[0056] In some cases, a variant immunomodulatory polypeptide present in a TMMP of the present disclosure has a binding affinity for a cognate co-immunomodulatory polypeptide that is from 1 nM to 100 nM, or from 100 nM to 100 μM. For example, in some cases, a variant immunomodulatory polypeptide present in a TMMP of the present disclosure has a binding affinity for a cognate co-immunomodulatory polypeptide that is from about 100 nM to 150 nM, from about 150 nM to about 200 nM, from about 200 nM to about 250 nM, from about 250 nM to about 300 nM, from about 300 nM to about 350 nM, from about 350 nM to about 400 nM, from about 400 nM to about 500 nM, from about 500 nM to about 600 nM, from about 600 nM to about 700 nM, from about 700 nM to about 800 nM, from about 800 nM to about 900 nM, from about 900 nM to about 1 to about 1 μM to about 5 μM, from about 5 μM to about 10 μM, from about 10 μM to about 15 μM, from about 15 μM to about 20 μM, from about 20 μM to about 25 μM, from about 25 μM to about 50 μM, from about 50 μM to about 75 μM, or from about 75 μM to about 100 μM. In some cases, a variant immunomodulatory polypeptide present in a TMMP of the present disclosure has a binding affinity for a cognate co-immunomodulatory polypeptide that is from about 1 nM to about 5 nM, from about 5 nM to about 10 nM, from about 10 nM to about 50 nM, from about 50 nM to about 100 nM.

[0057] The combination of the reduced affinity of the immunomodulatory polypeptide for its cognate co-immunomodulatory polypeptide, and the affinity of the epitope for a TCR, provides for enhanced selectivity of a TMMP of the present disclosure. For example, a TMMP of the present disclosure binds selectively to a first T cell that displays both: i) a TCR specific for the epitope present in the TMMP; and ii) a co-immunomodulatory polypeptide that binds to the immunomodulatory polypeptide present in the TMMP, compared to binding to a second T cell that displays: i) a TCR specific for an epitope other than the epitope present in the TMMP; and ii) a co-immunomodulatory polypeptide that binds to the immunomodulatory polypeptide present in the TMMP. For example, a TMMP of the present disclosure binds to the first T cell with an affinity that is at least 10%, at least 15%, at least 20%, at least 25%, at least 30%, at least 40%, at least 50%, at least 60%, at least 70%, at least 80%, at least 90%, at least 2-fold, at least 2.5-fold, at least 5-fold, at least 10-fold, at least 15-fold, at least 20-fold, at least 25-fold, at least 50-fold, at least 100-fold, or more than 100-fold, higher than the affinity to which it binds the second T cell.

[0058] In some cases, a TMMP of the present disclosure, when administered to an individual in need thereof, induces both an epitope-specific T cell response and an epitope non-specific T cell response. In other words, in some cases, a TMMP of the present disclosure, when administered to an individual in need thereof, induces an epitope-specific T cell response by modulating the activity of a first T cell that displays both: i) a TCR specific for the epitope present in the TMMP; ii) a co-immunomodulatory polypeptide that binds to the immunomodulatory polypeptide present in the TMMP; and induces an epitope non-specific T cell response by modulating the activity of a second T cell that displays: a TCR specific for an epitope other than the epitope present in the TMMP; and ii) a co-immunomodulatory polypeptide that binds to the immunomodulatory polypeptide present in the TMMP. The ratio of the epitope-specific T cell response to the epitope-non-specific T cell response is at least 2:1, at least 5:1, at least 10:1, at least 15:1, at least 20:1, at least 25:1, at least 50:1, or at least 100:1. The ratio of the epitope-specific T cell response to the epitope-non-specific T cell response is from about 2:1 to about 5:1, from about 5:1 to about 10:1, from about 10:1 to about 15:1, from about 15:1 to about 20:1, from about 20:1 to about 25:1, from about 25:1 to about 50:1, or from about 50:1 to about 100:1, or more than 100:1. “Modulating the activity” of a T cell can include one or more of: i) activating a cytotoxic (e.g., CD8⁺) T cell; ii) inducing cytotoxic activity of a cytotoxic (e.g., CD8⁺) T cell; iii) inducing production and release of a cytotoxin (e.g., a perforin; a granzyme; a granulysin) by a cytotoxic (e.g., CD8⁺) T cell; iv) inhibiting activity of an autoreactive T cell; and the like.

[0059] The combination of the reduced affinity of the immunomodulatory polypeptide for its cognate co-immunomodulatory polypeptide, and the affinity of the epitope for a TCR, provides for enhanced selectivity of a TMMP of the present disclosure. Thus, for example, a TMMP of the present disclosure binds with higher avidity to a first T cell that displays both: i) a TCR specific for the epitope present in the TMMP; and ii) a co-immunomodulatory polypeptide that binds to the immunomodulatory polypeptide present in the TMMP, compared to the avidity to which it binds to a second T cell that displays: i) a TCR specific for an epitope other than the epitope present in the TMMP; and ii) a co-immunomodulatory polypeptide that binds to the immunomodulatory polypeptide present in the TMMP.

[0060] Binding affinity between an immunomodulatory polypeptide and its cognate co-immunomodulatory polypeptide can be determined by bio-layer interferometry (BLI) using purified immunomodulatory polypeptide and purified cognate co-immunomodulatory polypeptide. Binding affinity between a TMMP and its cognate co-immunomodulatory polypeptide can be determined by BLI using purified TMMP and the cognate co-immunomodulatory polypeptide. BLI methods are well known to those skilled in the art. See, e.g., Lad et al. (2015) J. Biomol. Screen. 20(4):498-507; and Shah and Duncan (2014) J. Vis. Exp. 18:e5.1383.

[0061] A BLI assay can be carried out using an Octet RED 96 (Pal FortéBio) instrument, or a similar instrument, as follows. A TMMP (e.g., a TMMP of the present disclosure; a control TMMP (where a control TMMP comprises a wild-type immunomodulatory polypeptide)) is immobilized onto an insoluble support (a “biosensor”). The immobilized TMMP is the “target.” Immobilization can be effected by immobilizing a capture antibody onto the insoluble support, where the capture antibody immobilizes the TMMP. For example, immobilization can be effected by immobilizing anti-Fe (e.g., anti-human IgG Fe) antibodies onto the insoluble support, where the immobilized anti-Fe antibodies bind to and immobilize the TMMP (where the TMMP comprises an IgFc polypeptide). A co-immunomodulatory polypeptide is applied, at several different concentrations, to the immobilized TMMP, and the instrument's response recorded. Assays are conducted in a liquid medium comprising 25 mM HEPES pH 6.8, 5% poly(ethylene glycol) 6000, 50 mM KCl, 0.1% bovine serum albumin, and 0.02% Tween 20 nonionic detergent. Binding of the co-immunomodulatory polypeptide to the immobilized TMMP is conducted at 30° C. As a positive control for binding affinity, an anti-MHC Class I monoclonal antibody can be used. For example, anti-HLA Class I monoclonal antibody W6/32 (American Type Culture Collection No. 11B-95; Parham et al. (1979) J. Immunol. 123:342), which has a K_{D} of 7 nM, can be used. A standard curve can be generated using serial dilutions of the anti-MHC Class monoclonal antibody. The co-immunomodulatory polypeptide, or the anti-MHC Class I mAh, is the “analyte.” BLI analyzes the interference pattern of white light reflected from two surfaces: i) from the immobilized polypeptide (“target”); and ii) an internal reference layer. A change in the number of molecules (“analyte”; e.g., co-immunomodulatory polypeptide; anti-HLA antibody) bound to the biosensor tip causes a shift in the interference pattern; this shift in interference pattern can be measured in real time. The two kinetic terms that describe the affinity of the target/analyte interaction are the association constant (kₐ) and dissociation constant (k_{d}). The ratio of these two terms (k_{d}/ₐ) gives rise to the affinity constant K_{D}.

[0062] The BLI assay is carried out in a multi-well plate. To run the assay, the plate layout is defined, the assay steps are defined, and biosensors are assigned in Octet Data Acquisition software. The biosensor assembly is hydrated. The hydrated biosensor assembly and the assay plate are equilibrated for 10 minutes on the Octet instrument. Once the data are acquired, the acquired data are loaded into the Octet Data Analysis software. The data are processed in the Processing window by specifying method for reference subtraction, y-axis alignment, inter-step correction, and Savitzky-Golay filtering. Data are analyzed in the Analysis window by specifying steps to analyze (Association and Dissociation), selecting curve fit model (1:1), fitting method (global), and window of interest (in seconds). The quality of fit is evaluated. K_{D} values for each data trace (analyte concentration) can be averaged if within a 3-fold range. K_{D} error values should be within one order of magnitude of the affinity constant values; R² values should be above 0.95. See. e.g., Abdiche et al. (2008) J. Anal. Biochem. 377:209.

[0063] Unless otherwise stated herein, the affinity of a TMMP of the present disclosure for a cognate co-immunomodulatory polypeptide, or the affinity of a control TMMP (where a control TMMP comprises a wild-type immunomodulatory polypeptide) for a cognate co-immunomodulatory polypeptide, is determined using BLI, as described above.

[0064] In some cases, the ratio of: i) the binding affinity of a control. TMMP (where the control comprises a wild-type immunomodulatory polypeptide) to a cognate co-immunomodulatory polypeptide to ii) the binding affinity of a TMMP of the present disclosure comprising a variant of the wild-type immunomodulatory polypeptide to the cognate co-immunomodulatory polypeptide, when measured by BLI (as described above), is at least 1.5:1, at least 2:1, at least 5:1, at least 10:1, at least 15:1, at least 20:1, at least 25:1, at least 50:1, at least 100:1, at least 500:1, at least 10²:1, at least 5×10²:1, at least 10³:1, at least 5×10³:1, at least 10⁴:1, at least 10⁵:1, or at least 10⁶:1. In some cases, the ratio of: i) the binding affinity of a control TMMP (where the control comprises a wild-type immunomodulatory polypeptide) to a cognate co-immunomodulatory polypeptide to ii) the binding affinity of a TMMP of the present disclosure comprising a variant of the wild-type immunomodulatory polypeptide to the cognate co-immunomodulatory polypeptide, when measured by BLI, is in a range of from 1.5:1 to 10⁶:1, e.g., from 1.5:1 to 10:1, from 10:1 to 50:1, from 50:1 to 10²:1, from 10²:1 to 10³:1, from 10³: 1 to 10⁴:1, from 10⁴:1 to 10⁵:1, or from 10⁵:1 to 10⁶:1.

[0065] As an example, where a control TMMP comprises a wild-type IL-2 polypeptide, and where a TMMP of the present disclosure comprises a variant IL-2 polypeptide (comprising from 1 to 10 amino acid substitutions relative to the amino acid sequence of the wild-type IL-2 polypeptide) as the immunomodulatory polypeptide, the ratio of: i) the binding affinity of the control TMMP to an IL-2 receptor (i.e., the cognate co-immunomodulatory polypeptide) to ii) the binding affinity of the TMMP of the present disclosure to the IL-2 receptor, when measured by BLI, is at least 1.5:1, at least 2:1, at least 5:1, at least 10:1, at least 15:1, at least 20:1, at least 25:1, at least 50:1, at least 100:1, at least 500:1, at least 10²:1, at least 5×10²:1, at least 10³:1, at least 5×10³:1, at least 10⁴:1, at least 10⁵:1, or at least 10⁶:1. In some cases, where a control TMMP comprises a wild-type IL-2 polypeptide, and where a TMMP of the present disclosure comprises a variant IL-2 polypeptide (comprising from 1 to 10 amino acid substitutions relative to the amino acid sequence of the wild-type IL-2 polypeptide) as the immunomodulatory polypeptide, the ratio of: i) the binding affinity of the control TMMP to an IL-2 receptor (i.e., the cognate co-immunomodulatory polypeptide) to ii) the binding affinity of the TMMP of the present disclosure to the IL-2 receptor, when measured by BLI, is in a range of from 1.5:1 to 10⁶:1, e.g., from 1.5:1 to 10:1, from 10:1 to 50:1, from 50:1 to 10²:1, from 10²:1 to 10³:1, from 10³:1 to 10⁴:1, from 10⁴:1 to 10⁵:1, or from 10⁵: 1 to 10⁶:1.

[0066] As another example, where a control TMMP comprises a wild-type PD-L1 polypeptide, and where a TMMP of the present disclosure comprises a variant PD-L1 polypeptide (comprising from 1 to 10 amino acid substitutions relative to the amino acid sequence of the wild-type PD-L1 polypeptide) as the immunomodulatory polypeptide, the ratio of: i) the binding affinity of the control TMMP to a PD-1 polypeptide (i.e., the cognate co-immunomodulatory polypeptide) to ii) the binding affinity of the TMMP of the present disclosure to the PD-1 polypeptide, when measured by BLI, is at least 1.5:1, at least 2:1, at least 5:1, at least 10:1, at least 1.5:1, at least 20:1, at least 25:1, at least 50:1, at least 100:1, at least 500:1, at least 10²:1, at least 5×10²:1, at least 10³:1, at least 5×10³:1, at least 10⁴:1, at least 10⁵:1, or at least 10⁶:1.

[0067] As another example, where a control TMMP comprises a wild-type CD80 polypeptide, and where a TMMP of the present disclosure comprises a variant CD80 polypeptide (comprising from 1 to 10 amino acid substitutions relative to the amino acid sequence of the wild-type CD80 polypeptide) as the immunomodulatory polypeptide, the ratio of: i) the binding affinity of the control TMMP to a CTLA4 polypeptide (i.e., the cognate co-immunomodulatory polypeptide) to ii) the binding affinity of the TMMP of the present disclosure to the CTLA4 polypeptide, when measured by BLI, is at least 1.5:1, at least 2:1, at least 5:1, at least 10:1, at least 15:1, at least 20:1, at least 25:1, at least 50:1, at least 100:1, at least 500:1, at least 10²:1, at least 5×10²:1, at least 10³:1, at least 5×10³:1, at least 10⁴:1, at least 10³:1, or at least 10⁶:1.

[0068] As another example, where a control TMMP comprises a wild-type CD80 polypeptide, and where a TMMP of the present disclosure comprises a variant CD80 polypeptide (comprising from 1 to 10 amino acid substitutions relative to the amino acid sequence of the wild-type CD80 polypeptide) as the immunomodulatory polypeptide, the ratio of: 1) the binding affinity of the control TMMP to a CD28 polypeptide (i.e., the cognate co-immunomodulatory polypeptide) to ii) the binding affinity of the TMMP of the present disclosure to the CD28 polypeptide, when measured by BLI, is at least 1.5:1, at least 2:1, at least 5:1, at least 10:1, at least 15:1, at least 20:1, at least 25:1, at least 50:1, at least 100:1, at least 500:1, at least 10²:1, at least 5×10²:1, at least 10³:1, at least 5×10³:1, at least 10⁴:1, at least 10³:1, or at least 10⁶:1.

[0069] As another example, where a control TMMP comprises a wild-type 4-1BBL polypeptide, and where a TMMP of the present disclosure comprises a variant 4-1 BBL polypeptide (comprising from 1 to 10 amino acid substitutions relative to the amino acid sequence of the wild-type 4-1BBL polypeptide) as the immunomodulatory polypeptide, the ratio of: i) the binding affinity of the control TMMP to a 4-1BB polypeptide (i.e., the cognate co-immunomodulatory polypeptide) to ii) the binding affinity of the TMMP of the present disclosure to the 4-1BB polypeptide, when measured by BLI, is at least 1.5:1, at least 2:1, at least 5:1, at least 10:1, at least 15:1, at least 20:1, at least 25:1, at least 50:1, at least 100:1, at least 500:1, at least 10²:1, at least 5×10²:1, at least 10³:1, at least 5×10³:1 at least 10⁴:1, at least 10³:1, or at least 10⁶:1.

[0070] As another example, where a control TMMP comprises a wild-type CD86 polypeptide, and where a TMMP of the present disclosure comprises a variant CD86 polypeptide (comprising from 1 to 10 amino acid substitutions relative to the amino acid sequence of the wild-type CD86 polypeptide) as the immunomodulatory polypeptide, the ratio of: i) the binding affinity of the control TMMP to a CD28 polypeptide (i.e., the cognate co-immunomodulatory polypeptide) to ii) the binding affinity of the TMMP of the present disclosure to the CD28 polypeptide, when measured by BI-1, is at least 1.5:1, at least 2:1, at least 5:1, at least 10:1, at least 15:1, at least 20:1, at least 25:1, at least 50:1, at least 100:1, at least 500:1, at least 10²:1, at least 5×10²:1, at least 10³:1, at least 5×10³:1, at least 10⁴:1, at least 10³:1, or at least 10⁶:1.

[0071] Binding affinity of a TMMP of the present disclosure to a target T cell can be measured in the following manner: A) contacting a TMMP of the present disclosure with a target T-cell expressing on its surface: i) a cognate co-immunomodulatory polypeptide that binds the parental wild-type immunomodulatory polypeptide; and ii) a T-cell receptor that binds to the epitope, where the TMMP comprises an epitope tag, such that the TMMP binds to the target T-cell; B) contacting the target T-cell-bound TMMP with a fluorescently labeled binding agent (e.g., a fluorescently labeled antibody) that binds to the epitope tag, generating a TMMP/target T-cell/binding agent complex; C) measuring the mean fluorescence intensity (MFI) of the TMMP/target T-cell/binding agent complex using flow cytometry. The epitope tag can be, e.g., a FLAG tag, a hemagglutinin tag, a c-myc tag, a poly(histidine) tag, etc. The MFI measured over a range of concentrations of the TMMP library member provides a measure of the affinity. The MEI measured over a range of concentrations of the TMMP library member provides a half maximal effective concentration (EC₅₀) of the TMMP. In some cases, the EC₅O of a TMMP of the present disclosure for a target T cell is in the nM range; and the EC₅c of the TMMP for a control T cell (where a control T cell expresses on its surface: i) a cognate co-immunomodulatory polypeptide that binds the parental wild-type immunomodulatory polypeptide; and ii) a T-cell receptor that does not bind to the epitope present in the TMMP) is in the μM range. In some cases, the ratio of the EC₅₀ of a TMMP of the present disclosure for a control T cell to the EC₅₀ of the TMMP for a target T cell is at least 1.5:1, at least 2:1, at least 5:1, at least 10:1, at least 15:1, at least 20:1, at least 25:1, at least 50:1, at least 100:1, at least 500:1, at least 10²:1, at least 5×10²:1, at least 10³:1, at least 5×10³:1, at least 10⁴:1, at lease 10⁵:1, or at least 10⁶:1. The ratio of the EC₅₀ of a TMMP of the present disclosure for a control T cell to the EC₅₀ of the TMMP for a target T cell is an expression of the selectivity of the TMMP.

[0072] In some cases, when measured as described in the preceding paragraph, a TMMP of the present disclosure exhibits selective binding to target T-cell, compared to binding of the TMMP library member to a control T cell that comprises: i) the cognate co-immunomodulatory polypeptide that binds the parental wild-type immunomodulatory polypeptide; and ii) a T-cell receptor that binds to an epitope other than the epitope present in the TMMP library member.

### Dimerized TMMPs

[0073] A TMMP of the present disclosure can be dimerized; i.e., the present disclosure provides a multimeric polypeptide comprising a dimer of a TMMP of the present disclosure. Thus, the present disclosure provides a TMMP comprising: A) a first heterodimer comprising: a) a first polypeptide comprising: i) a peptide epitope; and ii) a first major histocompatibility complex (MHC) polypeptide; and h) a second polypeptide comprising: i) a second MHC polypeptide, wherein the first heterodimer comprises one or more immunomodulatory polypeptides; and B) a second heterodimer comprising: a) a first polypeptide comprising: i) a peptide epitope; and ii) a first MHC polypeptide; and b) a second polypeptide comprising: i) a second MHC polypeptide, wherein the second heterodimer comprises one or more immunomodulatory polypeptides, and wherein the first heterodimer and the second heterodimer are covalently linked to one another. In some cases, the two TMMPs are identical to one another in amino acid sequence. In some cases, the first heterodimer and the second heterodimer are covalently linked to one another via a C-terminal region of the second polypeptide of the first heterodimer and a C-terminal region of the second polypeptide of the second heterodimer. In some cases, first heterodimer and the second heterodimer are covalently linked to one another via the C-terminal amino acid of the second polypeptide of the first heterodimer and the C-terminal region of the second polypeptide of the second heterodimer; for example, in some cases, the C-terminal amino acid of the second polypeptide of the first heterodimer and the C-terminal region of the second polypeptide of the second heterodimer are linked to one another, either directly or via a linker. The linker can be a peptide linker. The peptide linker can have a length of from 1 amino acid to 200 amino acids (e.g., from 1 amino acid (aa) to 5 aa, from 5 aa to 10 aa, from 10 aa to 25 aa, from 25 aa to 50 aa, from 50 aa to 100 aa, from 100 aa to 150 aa, or from 150 aa to 200 aa). In some cases, the peptide epitope of the first heterodimer and the peptide epitope of the second heterodimer comprise the same amino acid sequence. In some cases, the first MHC polypeptide of the first and the second heterodimer is an MHC Class I β2-microglobulin, and wherein the second MHC polypeptide of the first and the second heterodimer is an MHC Class I heavy chain. In some cases, the immunomodulatory polypeptide of the first heterodimer and the immunomodulatory polypeptide of the second heterodimer comprise the same amino acid sequence. In some cases, the immunomodulatory polypeptide of the first heterodimer and the immunomodulatory polypeptide of the second heterodimer are valiant immunomodulatory polypeptides that comprise from 1 to 10 amino acid substitutions compared to a corresponding parental wild-type immunomodulatory polypeptide, and wherein the from 1 to 10 amino acid substitutions result in reduced affinity binding of the variant immunomodulatory polypeptide to a cognate co-immunomodulatory polypeptide. In some cases, the immunomodulatory polypeptide of the first heterodimer and the immunomodulatory polypeptide of the second heterodimer are each independently selected from the group consisting of IL-2, 4-1BBL, PD-L1, CD80, CD86, ICOS-L, OX-40L, FasL, JAG1 (CD339), CD70, and ICAM. Examples, of suitable MHC polypeptides, immunomodulatory polypeptides, and peptide epitopes are described below.

### MHC Polypeptides

[0074] As noted above, a TMMP of the present disclosure includes MHC polypeptides. For the purposes of the instant disclosure, the term “major histocompatibility complex (MHC) polypeptides” is meant to include MHC polypeptides of various species, including human MIX (also referred to as human leukocyte antigen (HLA)) polypeptides, rodent (e.g., mouse, rat, etc.) MHC polypeptides, and MHC polypeptides of other mammalian species (e.g., lagomorphs, non-human primates, canines, felines, ungulates (e.g., equines, bovines, ovines, caprines, etc.), and the like. The term “MHC polypeptide” is meant to include Class 1 MHC polypeptides (e.g., microglobulin and MMC class I heavy chain).

[0075] In some cases, the first MHC polypeptide is an MHC Class I β2M (β2M) polypeptide, and the second WIC polypeptide is an WIC Class 1 heavy chain (H chain) (“MHC-H”)). In other instances, the first MHC polypeptide is an MHC Class I heavy chain polypeptide; and the second MEC polypeptide is a β2N4 polypeptide. In some cases, both the β2M and MHC-H chain are of human origin; i.e., the MHC-H chain is an HLA heavy chain, or a variant thereof. Unless expressly stated otherwise, a TMMP of the present disclosure does not include membrane anchoring domains (transmembrane regions) of an MHC Class I heavy chain, or a part of MHC Class I heavy chain sufficient to anchor the resulting TMMP to a cell (e.g., eukaryotic cell such as a mammalian cell) in which it is expressed. In some cases, the MHC Class I heavy chain present in a TMMP of the present disclosure does not include a signal peptide, a transmembrane domain, or an intracellular domain (cytoplasmic tail) associated with a native MHC Class I heavy chain. Thus, e.g., in some cases, the MHC Class I heavy chain present in a TMMP of the present disclosure includes only the α1, α2, and α3 domains of an MHC Class I heavy chain. In some cases, the MHC Class I heavy chain present in a TMMP of the present disclosure has a length of from about 270 amino acids (aa) to about 290 aa. In some cases, the MHC Class 1 heavy chain present in a TMMP of the present disclosure has a length of 270 aa, 271 aa, 272 aa, 273 aa, 274 aa, 275 aa, 276 aa, 277 aa, 278 aa, 279 aa, 280 aa, 281 aa, 282 aa, 283 aa, 284 aa, 285 aa, 286 aa, 287 aa, 288 aa, 289 aa, or 290 aa.

[0076] In some cases, an MHC polypeptide of a TMMP is a human MHC polypeptide, where human MHC polypeptides are also referred to as “human leukocyte antigen” (“HLA”) polypeptides. In some cases, an MHC polypeptide of a TMMP is a Class I HLA polypeptide, e.g., a β2-microglobulin polypeptide, or a Class I HLA heavy chain polypeptide. Class I HLA heavy chain polypeptides include HLA-A heavy chain polypeptides, HLA-B heavy chain polypeptides, HLA-C heavy chain polypeptides, HLA-E heavy chain polypeptides, HLA-F heavy chain polypeptides, and HLA-G heavy chain polypeptides.

### MHC Class I Heavy Chains

[0077] In some cases, an MHC Class I heavy chain polypeptide present in a TMMP of the present disclosure comprises an amino acid sequence having at least 75%, at least 80%, at least 85%, at least 90%, at least 95%, at least 98%, at least 99%, or 100%, amino acid sequence identity to all or part (e.g., 50, 75, 100, 150, 200, or 250 contiguous amino acids) of the amino acid sequence of any of the human HLA heavy chain polypeptides depicted in FIGS. 7-13. In some cases, the MHC Class I heavy chain has a length of 270 aa, 271 aa, 272 aa, 273 aa, 274 aa, 275 aa, 276 aa, 277 aa, 278 aa, 279 aa, 280 aa, 281 aa, 282 aa, 283 aa, 284 aa, 285 aa, 286 aa, 287 aa, 288 aa, 289 aa, or 290 aa. In some cases, an MHC Class I heavy chain polypeptide present in a TMMP of the present disclosure comprises 1-30, 1-5, 5-10, 10-15, 15-20, 20-25 or 25-30 amino acid insertions, deletions, and/or substitutions (in addition to those locations indicated as being variable in the heavy chain consensus sequences) of any one of the amino acid sequences depicted in FIGS. 7-13. In some cases, the MHC Class I heavy chain does not include transmembrane or cytoplasmic domains. As an example, a MHC Class I heavy chain polypeptide of a TMMP of the present disclosure can comprise an amino acid sequence having at least 75%, at least 80%, at least 85%, at least 90%, at least 95%, at least 98%, at least 99%, or 100%, amino acid sequence identity to amino acids 25-300 (lacking all, or substantially all, of the leader, transmembrane and cytoplasmic sequence) or amino acids 25-365 (lacking the leader) of a human HLA-A heavy chain polypeptides depicted in any one of FIGS. 7A, 7B, and 7C.

[0078] FIGS. 7A, 7B and 7C provide amino acid sequences of human leukocyte antigen (HLA) Class I heavy chain polypeptides. Signal sequences, amino acids 1-24, are bolded and underlined. FIG. 7A entry: 3A.1 is the HLA-A heavy chain (HLA-A*01:01:01:01 or A*0101) (NCBI accession NP_001229687.1), SEQ ID NO:23; entry 3A.2 is from HLA-A*1101 SEQ ID NO:24; entry 3A.3 is from HLA-A*2402 SEQ ID NO:25 and entry 3A.4 is from HLA-A*3303 SEQ ID NO:26. FIG. 7B provides the sequence HLA-B*07:02:01 (HLA-B*0702) NCBI GenBank Accession NP_005505.2 (see also GenBank Accession AUV50118.1). FIG. 7C provides the sequence HLA-C*0701 (GenBank Accession NP_001229971.1) (HLA-C*07:0.1:01:01 or HLA-Cw*070101. HLA-Cw*07 see GenBank Accession CA078194.1).

[0079] FIG. 8 provides an alignment of eleven mature MHC class I heavy chain amino acid sequences without their leader sequences or transmembrane domains or intracellular domains. The aligned sequences are human HLA-A, HLA-B, and HLA-C, a mouse 112K protein sequence, three variants of HLA-A (var.1, var. 2C, and var.2CP), and 3 human HLA-A variants (HLA-A*1101; HLA-A*2402; and HLA-A*3303). Indicated in the alignment are the locations (84 and 139 of the mature proteins) where cysteine residues may be introduced (e.g., by substitution) for the formation of a disulfide bond to stabilize the MHC H chain-β2M complex. Also shown in the alignment is position 236 (of the mature polypeptide), which may be substituted by a cysteine residue that can form an inter-chain disulfide bond with β2M (e.g., at aa 12). An arrow appears above each of those locations and the residues are bolded. The seventh HLA-A sequence shown in the alignment (var. 2c), shows the sequence of variant 2 substituted with C residues at positions 84, 139 and 236. The boxes flanking residues 84, 139 and 236 show the groups of five amino acids on either sides of those six sets of five residues, denoted aac1 (for “amino acid cluster 1”), aac2 (for “amino acid cluster 2”), aac3 (for “amino acid cluster 3”), aac4 (for “amino acid cluster 4”), aac5 (for “amino acid cluster 5”), and aac6 (for “amino acid cluster 6”), that may be replaced by 1 to 5 amino acids selected independently from (i) any naturally occurring amino acid or (ii) any naturally occurring amino acid except proline or glycine.

[0080] With regard to FIG. 8, in some cases: i) aac1 (amino acid cluster 1) may be the amino acid sequence GTLRG (SEQ ID NO:287) or that sequence with one or two amino acids deleted or substituted with other naturally occurring amino acids (e.g., L replaced by I, V, A or F); ii) aac2 (amino acid cluster 2) may be the amino acid sequence YNQSE (SEQ ID NO:288) or that sequence with one or two amino acids deleted or substituted with other naturally occurring amino acids (e.g., N replaced by Q, Q replaced by N, and/or E replaced by D); iii) aac3 (amino acid cluster 3) may be the amino acid sequence TAADM. (SEQ ID NO:289) or that sequence with one or two amino acids deleted or substituted with other naturally occurring amino acids (e.g., T replaced by S. A replaced by G, D replaced by E, and/or M replaced by L, V, or I); iv) aac4 (amino acid cluster 4) may be the amino acid sequence AQTTK (SEQ ID NO:290) or that sequence with one or two amino acids deleted or substituted with other naturally occurring amino acids (e.g., A replaced by G. Q replaced by N, or T replaced by S, and/or K replaced by R or Q); v) aac5 (amino acid cluster 5) may be the amino acid sequence VETRP (SEQ ID NO:291) or that sequence with one or two amino acids deleted or substituted with other naturally occurring amino acids (e.g., V replaced by 1 or L, E replaced by D, T replaced by S, and/or R replaced by K); and/or vi) aac6 (amino acid cluster 6) may be the amino acid sequence GDGTF (SEQ ID NO:292) or that sequence with one or two amino acids deleted or substituted with other naturally occurring amino acids (e.g., D replaced by E, T replaced by S. or F replaced by L, W, or Y).

[0081] FIGS. 9-11 provide alignments of mature HLA class I heavy chain amino acid sequences (without leader sequences or transmembrane domains or intracellular domains). The aligned amino acid sequences in FIG. 9A am HLA-A class I heavy chains of the following alleles: A*0101. A*0201, A*0301, A*1101, A*2301. A*2402, A*2407, A*3303, and A*3401. The aligned amino acid sequences in FIG. 10A are HLA-B class I heavy chains of the following alleles: B*0702, B*0801, B*1502, B*3802, B*4001, B*4601, and B*5301. The aligned amino acid sequences in FIG. 11A are HLA-C class I heavy chains of the following alleles: C*0102, C*0303, C*0304, C*0401, C*0602, C*0701, C*0801, and C*1502. Indicated in the alignments are the locations (84 and 139 of the mature proteins) where cysteine residues may be introduced (e.g., by substitution) for the formation of a disulfide bond to stabilize the HLA H chain-β2M complex. Also shown in the alignment is position 236 (of the mature polypeptide), which may be substituted by a cysteine residue that can form an inter-chain disulfide bond with β2M (e.g., at aa 12). The boxes flanking residues 84, 139 and 236 show the groups of five amino acids on either sides of those six sets of five residues, denoted aac1 (for “amino acid cluster 1”), aac2 (for “amino acid cluster 2”), aac3 (for “amino acid cluster 3”), aac4 (for “amino acid cluster 4”), aac5 (for “amino acid cluster 5”), and aac6 (far “amino acid cluster 6”), that may be replaced by 1 to 5 amino acids selected independently from (i) any naturally occurring amino acid or (ii) any naturally occurring amino acid except praline or glycine.

[0082] FIGS. 9A, 10A, and 11A provide alignments of the amino acid sequences of mature HLA-A, -B, and -C class I heavy chains, respectively. The sequences are provided for the extracellular portion of the mature protein (without leader sequences or transmembrane domains or intracellular domains). As described in FIG. 8, the positions of aa residues 84, 139, and 236 and their flanking residues (aac1 to aac6) that may be replaced by 1 to 5 amino acids selected independently from (i) any naturally occurring amino acid or (ii) any naturally occurring amino acid except proline or glycine ae also shown. FIGS. 9B, 108, and 11B provide consensus amino acid sequences for the HLA-A, -B, and -C sequences, respectively, provide in FIGS. 9A, 10A, and 11A. The consensus sequences show the variable amino acid positions as “X” residues sequentially numbered and the locations of amino acids 84, 139 and 236 double underlined.

[0083] With regard to FIG. 9A, in some cases: i) aac1 (amino acid cluster 1) may be the amino acid sequence GTLRG (SEQ ID NO:287) or that sequence with one or two amino acids deleted or substituted with other naturally occurring amino acids (e.g., L replaced by I, V, A or F); ii) aac2 (amino acid cluster 2) may be the amino acid sequence YNQSE (SEQ ID NO:288) or that sequence with one or two amino acids deleted or substituted with other naturally occurring amino acids (e.g., N replaced by Q, Q replaced by N, and/or E replaced by D); iii) aac3 (amino acid cluster 3) may be the amino acid sequence TA ADM (SEQ ID NO:289) or that sequence with one or two amino acids deleted or substituted with other naturally occurring amino acids (e.g., T replaced by S, A replaced by G, D replaced by E, and/or M replaced by L, V, or I); iv) aac4 (amino acid cluster 4) may be the amino acid sequence AQTTK (SEQ ID NO:290) or that sequence with one or two amino acids deleted or substituted with other naturally occurring amino acids (e.g., A replaced by G. Q replaced by N, or T replaced by S, and or K replaced by R or Q); v) aac5 (amino acid cluster 5) may be the amino acid sequence VETRP (SEQ ID NO:291) or that sequence with one or two amino acids deleted or substituted with other naturally occurring amino acids (e.g., V replaced by I or L, E replaced by D, T replaced by S, and/or R replaced by K); and/or vi) aac6 (amino acid cluster 6) may be the amino acid sequence GDGTF (SEQ ID NO:292) or that sequence with one or two amino acids deleted or substituted with other naturally occurring amino acids (e.g., D replaced by E, T replaced by S, or F replaced by L. W, or Y).

[0084] With regard to FIG. 10A, in some cases: i) aac1 (amino acid cluster 1) may be the amino acid sequence RNLRG (SEQ ID NO:293) or that sequence with one or two amino acids deleted or substituted with other naturally occurring amino acids (e.g., N replaced by T or I; and/or L replaced by A; and/or the second R replaced by L; and/or the G replaced by R); ii) aac2 (amino acid cluster 2) may be the amino acid sequence YNQSE (SEQ ID NO:288) or that sequence with one or two amino acids deleted or substituted with other naturally occurring amino acids (e.g., N replaced by Q, Q replaced by N, and/or E replaced by D); iii) aac3 (amino acid cluster 3) may be the amino acid sequence TAADT (SEQ ID NO:294) or that sequence with one or two amino acids deleted or substituted with other naturally occurring amino acids (e.g., the first T replaced by S; and/or A replaced by G; and/or D replaced by E; and/or the second T replaced by S); iv) aac4 (amino acid cluster 4) may be the amino acid sequence AQITQ (SEQ ID NO:295) or that sequence with one or two amino acids deleted or substituted with other naturally occurring amino acids (e.g., A replaced by G; and/or the first Q replaced by N; and/or I replaced by L or V; and/or the T replaced by S; and/or the second Q replaced by N); v) aac5 (amino acid cluster 5) may be the amino acid sequence VETRP (SEQ ID NO:291) or that sequence with one or two amino acids deleted or substituted with other naturally occurring amino acids (e.g., V replaced by I or L, E replaced by I), T replaced by S, and/or R replaced by K); and/or vi) aac6 (amino acid cluster 6) may be the amino acid sequence GDRTF (SEQ ID NO:296) or that sequence with one or two amino acids deleted or substituted with other naturally occurring amino acids (e.g., D replaced by E; and/or T replaced by S; and/or R replaced by K or H; and/or F replaced by L, W, or Y).

[0085] With regard to FIG. 11A, in some cases: aac1 (amino acid cluster 1) may be the amino acid sequence RNLRG (SEQ ID NO:293) or that sequence with one or two amino acids deleted or substituted with other naturally occurring amino acids (e.g., N replaced by K; and/or L replaced by A or I; and/or the second R replaced by H; and/or the G replaced by T or S); ii) aac2 (amino acid cluster 2) may be the amino acid sequence YNQSE (SEQ ID NO:288) or that sequence with one or two amino acids deleted or substituted with other naturally occurring amino acids (e.g., N replaced by Q, Q replaced by N, and/or E replaced by D); iii) aac3 (amino acid cluster 3) may be the amino acid sequence TAADT (SEQ ID NO:294) or that sequence with one or two amino acids deleted or substituted with other naturally occurring amino acids (e.g., the first T replaced by S; and/or A replaced by G; and/or D replaced by E; and/or the second ‘I’ replaced by S); iv) aac4 (amino acid cluster 4) may be the amino acid sequence AQITQ (SEQ ID NO:295) or that sequence with one or two amino acids deleted or substituted with other naturally occurring amino acids (e.g., A replaced by G; and/or the first Q replaced by N; and/or I replaced by L; and/or the second Q replaced by Nor K); v) aac5 (amino acid cluster 5) may be the amino acid sequence VETRP (SEQ ID NO:291) or that sequence with one or two amino acids deleted or substituted with other naturally occurring amino acids (e.g., V replaced by I or L, E replaced by D, T replaced by S, and/or R replaced by K or H); and/or vi) aac6 (amino acid cluster 6) may be the amino acid sequence GDGTF (SEQ ID NO:292) or that sequence with one or two amino acids deleted or substituted with other naturally occurring amino acids (e.g., D replaced by E; and/or T replaced by S; and/or F replaced by L, W, or Y).

### HLA-A

[0086] In some cases, a TMMP of the present disclosure comprises an HLA-A heavy chain polypeptide. The HLA-A heavy chain peptide sequences, or portions thereof, that may be that may be incorporated into a TMMP of the present disclosure include, but are not limited to, the alleles: A*0101, A*0201, A*0301, A*1101, A*230I, A*2402, A*2407, A*3303, and A*3401, which are aligned without all, or substantially all, of the leader, transmembrane and cytoplasmic sequences in FIG. 9A. Any of those alleles may comprise a mutation at one or more of positions 84, 139 and/or 236 (as shown in FIG. 9A) selected from: a tyrosine to alanine at position 84 (Y84A); a tyrosine to cysteine at position 84 (Y84C); an alanine to cysteine at position 139 (A139C); and an alanine to cysteine substitution at position 236 (A236C). In addition, HLA-A sequence having at least 75% (e.g., at least 80%, at least 85%, at least 90%, at least 95%, at least 98%, at least 99%) or 100% amino acid sequence identity to all or part (e.g., 50, 75, 100, 150, 200, or 250 contiguous amino acids) of the sequence of those HLA-A alleles may also be employed (e.g., it may comprise 1-25, 1-5, 5-10, 10-15, 15-20, 20-25, or 25-30 amino acid insertions, deletions, and/or substitutions).

[0087] In some cases, a TMMP of the present disclosure comprises an HLA-A heavy chain polypeptide comprising the following HLA-A consensus amino acid sequence:

[0088] GSHSMRYFX1TSVSRPGRGEPRFIAVGYVDDTQFVREDSDAASQX2MEPRAPWIE QEGPEYWDX3X4TX5X6X7KAX8SQX9X10RX11X12LX13X14X15X16X17XYNQSEX18GSHTX19QX20MX21GCDVGX22DX23RFLRGYX24QX25AYDGKDYIALX26EDLRSWTAADMIIAQX27T X\vec{287X29}KWEX30X31X32EAEQX33RX34YLX35GX36CVX37X38LRRYLENGKETLQRTDX39PK THMTHHX40X41SDHEATLRCWALX42FYPAEITLTWQRDGEDQTQDTELVETRPAGDGTFQK WAX43VVVPSGX44EQRYTCHVQHEGLPKPLTLRWEX45 (SEQ ID NO:29), wherein X1 is F, Y, S, or T; X2 is K or R; X3 is Q, G. E, or R; X4 is N or E; X5 is R or G; X6 is N or K; X7 is M or V; X8 is H or Q; X9 is T or I; X10 is D or H; X11 is A, V, or E; X12 is N or D; X13 is G or R; X14 is T or I; X15 is L or A; X16 is R or L; X17 is G R; X18 is A or D; X19 is I, L, or V; X20 is I, R or M; X21 is F or Y; X22 is S or P; X23 is W or G; X24 is R. H. or Q; X25 is L) or Y; X26 is N or K; X27 is Tor 1: X28 is K or Q; X29 is R or H; X30 is A or V; X31 is A or V; X32 is H or R; X33 is R, L, Q, or W; X34 is V or A; X35 is D or E; X36 is R or T; X37 is D or E; X38 is W or G; X39 is P or A; X40 is P or A; X41 is V or 1; X42 is S or G; X43 is A or S; X44 is Q or E; and X45 is P or L.

[0089] As one example, an MHC Class 1 heavy chain polypeptide of a TMMP can comprise an amino acid sequence having at least 75%, at least 80%, at least 85%, at least 90%, at least 95%, at least 98%, at least 99%, or 100%, amino acid sequence identity to the following human HLA-A heavy chain amino acid sequence:

(SEQ ID NO: 297)
GSHSMRYFFTSVSRPGRGEPRFIAVGYVDDTQFVRFDSDAASQRMEP
RAPWIEQEGPEYWDGETRKVKAHSQTHRVLGTLRGYYNQSEAGSHTV
QRMYGCDVGSDWRFLRGYHQYAYDGKDYIALKEDLRSWTAADMAAQT
TKHKWEAAHVAEQLRAYLEGTCVEWLRRYLENGKETLQRTDAPKTHM
THHAVSDHEATLRCWALSFYPAEITLTWQRDGEDQTQDTELVETRPA
GDGTFQKWAAVVVPSGQEQRYTCHVQHEGLPKPLTLRWEP.

[0090] In some cases, an HLA-A heavy chain polypeptide suitable for inclusion in a TMMP of the present disclosure comprises the following amino acid sequence: GSHISMRYFETSVSRPORGEPRFIAVGYVDDTQFVRFDSDAASQRMEPRAPWIEQEGPEYWDGET RKVKAHSQTHRVDLGTLRGYYNQSEAGSHTVQRMYGCDVGSDWRFLRGYHQYAYDGKDYIA LKEDLRSWTAADMAAQTTKHKWEAAHVAEQLRAYLEGTCVEWLRRYLENGKETLQRTDAPK THMTHHAVSDHEATLRCWALSFYPAEITLTWQRDGEDQTQDTELVETRPAGDGTFQKWAAVV VPSGQEQRYTCHVQHEGLPKPLTLRWEP (SEQ ID NO:297). This HLA-A heavy chain polypeptide is also referred to as “HLA-A*0201” or simply “HLA-A02.” In some cases, the C-terminal Pro is not included in a TMMP of the present disclosure. For example, in some cases, an HLA-A02 polypeptide suitable for inclusion in a TMMP of the present disclosure comprises the following amino acid sequence:

(SEQ ID NO: 470)
[sequence omitted]

### HLA-A (Y84A; A236C)

[0091] In some cases, the MHC Class 1 heavy chain polypeptide comprises Y84A and A236C substitutions. For example, in some cases, the MHC Class 1 heavy chain polypeptide comprises an amino acid sequence having at least 75%, at least 80%, at least 85%, at least 90%, at least 95%, at least 98%, at least 99%, or 100%, amino acid sequence identity to the following human HLA-A heavy chain (Y84A; A236C) amino acid sequence: GSHSMRYFFTSVSRPGRGEPRFIAVGYVDDTQFVRFDSDAASQRMEPRAPWIEQEGPEYWDGET RKVKAIISQTHRVDLGTLRGAYNQSEAGSHTVQRMYGCDVGSDWRFLRGYHQYAYMKDYIA LKEDLRSWTAADMAAQTTKHKWEAAHVAEQLRAYLEGTCVEWLRRYLENGKETLQRTDAPK THMTHHAVSDHEATLRCWALSFYPAEITLTWQRDGEDQTQDTELVETRPCGDGTFQKWAAVV VPSGQEQRYTCHVQHEGLPKPLTLRWEP (SEQ ID NO:298), where amino acid 84 is Ala and amino acid 236 is Cys. In some cases, the Cys-236 forms an interchain disulfide bond with Cys-12 of a variant 112M polypeptide that comprises an RUC substitution.

[0092] In some cases, an HLA-A heavy chain polypeptide suitable for inclusion in a TMMP of the present disclosure is an HLA-A02 (Y84A; A236C) polypeptide comprising the following amino acid sequence:

(SEQ ID NO: 298)
GSHSMRYFFTSVSRPGRGEPRFIAVGYVDDTQFVRFDSDAASQRMEP
RAPWIEQEGPEYWDGETRKVKAHSQTHRVDLGTLRGAYNQSEAGSHT
VQRMYGCDVGSDWRFLRGYHQYAYDGKDYIALKEDLRSWTAADMAAQ
TTKHKWEAAHVAEQLRAYLEGTCVEWLRRYLENGKETLQRTDAPKTH
MTHHAVSDHEATLRCWALSFYPAEITLTWQRDGEDQTQDTELVETRP
CGDGTFQKWAAVVVPSGQEQRYTCHVQHEGLPKPLTLRWEP.

[0093] In some cases, an HLA-A heavy chain polypeptide suitable for inclusion in a TMMP of the present disclosure is an HLA-A02 (Y84A; A236C) polypeptide comprising the following amino acid sequence:

(SEQ ID NO: 511)
GSHSMRYFFTSVSRPGRGEPRFIAVGYVDDTQFVRFDSDAASQRMEP
RAPWIEQEGPEYWDGETRKVKAHSQTHRVDLGTLRGAYNQSEAGSHT
VQRMYGCDVGSDWRFLRGYHQYAYDGKDYIALKEDLRSWTAADMAAQ
TTKHKWEAAHVAEQLRAYLEGTCVEWLRRYLENGKETLQRTDAPKTH
MTHHAVSDHEATLRCWALSFYPAEITLTWQRDGEDQTQDTELVETRP
CGDGTFQKWAAVVVPSGQEQRYTCHVQHEGLPKPLTLRWE.

### HLA-A (Y84C; A139C)

[0094] In some cases, the MHC Class I heavy chain polypeptide comprises Y84C and A139C substitutions. For example, in some cases, the MHC Class I heavy chain polypeptide comprises an amino acid sequence having at least 75%, at least 80%, at least 85%, at least 90%, at least 95%, at least 98%, at least 99%, or 100%, amino acid sequence identity to the following human HLA-A heavy chain (Y84C; A139C) amino acid sequence: GSHSMRYFFTSVSRPGRGEPRFIAVGYVDDTQFVRFDSDAASQRMEPRAPWIEQEGPEYWDGET RKVKAHSQTHRVDLGTLRGCYNQSEAGSHTVQRMYGCDVGSDWRFLRGYHQYAYDGKDYIA LKEDLRSWTAADMCAQTTKFIKWEAAITVAEQLRAYLEGTCVEWLRRYLENGKETLQRTDAPK THMTHHAVSDHEATLRCWALSFYPAEITLTWQRDGEDQTQDTELVEIRPAGDGTFQKWAAVV VPSGQEQRYTCHVQHEGLPKPLTLRWEP (SEQ ID NO:299), where amino acid 84 is Cys and amino acid 139 is Cys. In some cases, Cys-84 forms an intrachain disulfide bond with Cys-139.

### HLA-A11 (HLA-A*1101)

[0095] As one non-limiting example, an MHC Class I heavy chain polypeptide of a TMMP can comprise an amino acid sequence having at least 75%, at least 80%, at least 85%, at least 90%, at least 95%, at least 98%, at least 99%, or 100%, amino acid sequence identity to the following human HLA-A11 heavy chain amino acid sequence: GSHSMRYFYTSVSRPGRGEPRFIAVGYVDDTQFVREDSDAASQRMEPRAPWIEQEGPEYWDQE TRNVKAQSQTDRVDLGTLRGYYNQSEDGSHTIQIMYGCDVGPDGRFLRGYRQDAYDGKDYIA LNEDLRSWTAADMAAQITKRKWEAAHAAEQQRAYLEGTCVEWLRRYLENGKETLQRTDPPKT HMTHHPISDHEATLRCWALGFYPAEITLTWQRDGEDQTQDTELVETRPAGDCITFQKWAAVVV PSGEEQRYTCHVQHEGLPKPLTLRWE (SEQ ID NO:300). Such an MHC Class I heavy chain may be prominent in Asian populations, including populations of individuals of Asian descent.

### HLA-A11 (Y84A; A236C)

[0096] As one non-limiting example, in some cases, the MHC Class I heavy chain polypeptide is an HLA-A11 allele that comprises Y84A and A236C substitutions. For example, in some cases, the MHC Class I heavy chain polypeptide comprises an amino acid sequence having at Lew 75%, at least 80%, at least 85%, at least 90%, at least 95%, at least 98%, at least 99%, or 100%, amino acid sequence identity to the following human HLA-A A11 heavy chain (Y84A; A236C) amino acid sequence: GSHSMRYFYTSVSRPGRGEPRFIAVGYVDDTQFVRFDSDAASQRMEPRAPWIEQEGPEYWDQE TRNVKAQSQTDRVDLGTLRGAYNQSEDGSHTIQIMYCTCDVCTPDGRELRGYRQDAYDGKDYIA LNEDLRSWTAADMAAQITKRKWEAAHAAEQQRAYLEGTCVEWLRRYLENGKETLQRTDPPKT HMTHHPISDHEATLRCWALGFYPAEITLTWQRDGEDQTQDTELVETRPCGDGTFQKWAAVVV PSGEEQRYTCHVQHEGLPKPLTLRWE (SEQ ID NO:301), where amino acid 84 is Ala and amino acid 236 is Cys. In some cases, the Cys-236 forms an interchain disulfide bond with Cys-12 of a variant 112M polypeptide that comprises an R12C substitution.

### HLA-A24 (MA-A*2402)

[0097] As one non-limiting example, an MHC Class I heavy chain polypeptide of a TMMP of the present disclosure can comprise an amino acid sequence having at least 75%, at least 80%, at least 85%, at least 90%, at least 95%, at least 98%, at least 99%, or 100%, amino acid sequence identity to the following human HLA-A24 heavy chain amino acid sequence: GSHSMRYESTSVSRPORGEPRFIAVGYVDDTQFVRFDSDAASQRMEPRAPWIEQEGPEYWDEET GKVKAHSQTDRENLRIALRYYNQSEAGSTITLQMMFOCDVGSDGRFLROYHQYAYDGKDYIAL KEDLRSWIAADMAAQITLRKWEAAHVAEQQRAYLEGTCVDGLRRYLENGKETLQRTDPPKT HMTHHPISDHEATLRCWALGFYPAEITLIWQRDGEDQTQDTELVETRPAGDGTEQKWAAVVV PSGEEQRYTCHVQHECILPKPLTLRWEPSSQPTVPIVCTHAGLVLLGAVITGAVVAAVMWRRNSS DRKGGSYSQAASSOSAQGSDVSLTACKV (SEQ ID NO:302). Such an MHC Class 1 heavy chain may be prominent in Asian populations, including populations of individuals of Asian descent. In some cases, amino acid 84 is an Ala. In some cases, amino acid 84 is a Cys. In some cases, amino acid 236 is a Cys. In some cases, amino acid 84 is an Ala and amino acid 236 is a Cys. In some cases, amino acid 84 is an Cys and amino acid 236 is a Cys.

### HLA-A33 (HLA-A*3303)

[0098] As one non-limiting example, an MHC Class 1 heavy chain polypeptide of a TMMP of the present disclosure can comprise an amino acid sequence having at least 75%, at least 80%, at least 85%, at least 90%, at least 95%, at least 98%, at least 99%, or 100%, amino acid sequence identity to the following human HLA-A33 heavy chain amino acid sequence: GSFISMRYFTTSVSRPGRGEPRFIAVGYVDDTQFVRFDSDAASQRMEPRAPWIEQEGPEYWDRN TRNVKAHSQIDRVDLGTLRGYYNQSEAGSHTIQMMYGCDVGSDGRELRGYQQDAYDGIWYIA LNEDLRSWTAADMAAQITQRKWEAARVAEQLRAYLEGTCVEWLRRYLENGKETLQRTDPPKT HMTHHAVSDHEATLRCWALSFYPAEITUTWQRDGEDQTQDTELVETRPAGDGTFQKWASVVV PSGQEQRYTCHVQHECILPKPLTLRWEPSSQPTIPIVGIIAGLVLFGAVFACAVVAAVRWRRKSSD RKGGSYSQAASSDSAQGSDMSLTACKV (SEQ ID NO:303). Such an MHC Class I heavy chain may be prominent in Asian populations, including populations of individuals of Asian descent. In some cases, amino acid 84 is an Ala. In some cases, amino acid 84 is a Cys. In some cases, amino acid 236 is a Cys. In some cases, amino acid 84 is an Ala and amino acid 236 is a Cys. In some cases, amino acid 84 is an Cys and amino acid 236 is a Cys.

### HLA-B

[0099] In some cases, a TMMP of the present disclosure comprises an HLA-B heavy chain polypeptide. The HLA-B heavy chain peptide sequences, or portions thereof, that may be that may be incorporated into a TMMP of the present disclosure include, but are not limited to, the alleles: B*0702, B*0801, B*1502, B*3802, B*4001, B*4601, and B*5301, which are aligned without all, or substantially all, of the leader, transmembrane and cytoplasmic sequences in FIG. 10A. Any of those alleles may comprise a mutation at one or more of positions 84, 139 and/or 236 (as shown in FIG. 104) selected from: a tyrosine to alanine at position 84 (Y84A); a tyrosine to cysteine at position 84 (Y84C); an alanine to cysteine at position 139 (A139C); and an alanine to cysteine substitution at position 236 (A236C). In addition, a HLA-B polypeptide comprising an amino acid sequence having at least 75% (e.g., at least 80%, at least 85%, at least 90%, at least 95%, at least 98%, at least 99%) or 100% amino acid sequence identity to all or part (e.g., 50.75, 100, 150, 200, or 250 contiguous amino acids) of the sequence of those HLA-B alleles may also be employed (e.g., it may comprise 1-25, 1-5, 5-10, 10-15, 15-20, 20-25, or 25-30 amino acid insertions, deletions, and/or substitutions).

[0100] In some cases, a TMMP of the present disclosure comprises an HLA-B heavy chain polypeptide comprising the following HLA-B consensus amino acid sequence:

[0101] GSHSMRYFX1TX2X3SRPGRGEPRFIX4VGYVDDTXSFVRFDSDAX6SPRX7X8PR APWIEQEGPEYWDRX9TQX10X11KTX12X13TQX14YX15X16NLX17X18X19X20YYNQSEAGS HX21X22QX23MYGCDLGPDGRLLRGHDQSAYDGKDYIALNEDLX24SWTAADTAAQIX25QRK X26EAARX27AEQX28RX29YLEGX30CVEWLRRYLENGKX31X32LX33RADPPKTHVTHHPX34 SDHEATLRCWALGFYPAEITLTWQRDGEDQTQDTELVETRPAGDRTFQKWAAVVVPSGEEQR YTCHVQHEGLPKPLTLRWEP (SEQ ID NO:30), wherein X1 is H, Y, or D; X2 is A or S; X3 is M or V; X4 is A, S, or T; X5 is Q or L; X6 is A or T; X7 is E, M K. or T; X8 is A or T; X9 is E or N; X10 is I or K; X11 is Y, F, S, or C; X12 is N or Q; X13 is A or T; X14 is D or Y; X15 is E or V; X16 is S or N; X17 is T, N, or I; X18 is A or L; X19 is L, or R; X20 is R or G; X2I is T or I; X22 is L or I; X23 is R or S; X24 is R or S; X25 is S or T; X26 is L or W; X27 is E OR V; X28 is R, D, L or W; X29 is A or T; X30 is L, E or T; X31 is E or D; X32 is K or T; X33 is E or Q; and X34 is I or V.

[0102] As an example, an MHC Class I heavy chain polypeptide of a TMMP of the present disclosure can comprise an amino acid sequence having at least 75%, at least 80%, at least 85%, at least 90%, at least 95%, at least 98%, at least 99%, or 100%, amino acid sequence identity to the following human HLA-B heavy chain amino acid sequence:

(SEQ ID NO: 304)
GSHSMRYFYTSVSRPGRGEPRFIAVGYVDDTQFVRFDSDAASPREEPRAP
WIEQEGPEYWDRNTQIYKAQAQTDRESLRNLRGYYNQSEAGSHTLQSMYG
CDVGPDGRLLRGHDQYAYDGKDYIALNEDLRSWTAADTAAQITQRKWEAA
REAEQRRAYLEGECVEWLRRYLENGKDKLERADPPKTHVTHHPISDHEAT
LRCWALGFYPAEITLTWQRDGEDQTQDTELVETRPAGDRTFQKWAAVVVP
SGEEQRYTCHVQHEGLPKPLTLRWEP.

### HLA-B (Y84A; A236C)

[0103] As one non-limiting example, in some cases, the MHC Class 1 heavy chain polypeptide is an HLA-B polypeptide that comprises Y84A and A236C substitutions. For example, in some cases, the MHC Class 1 heavy chain polypeptide comprises an amino acid sequence having at least 75%, at least 80%, at least 85%, at least 90%, at least 95%, at least 98%, at least 99%, or 100%, amino acid sequence identity to the following human HLA-B heavy chain (Y84A; A236C) amino acid sequence: GSHSMRYFYTSVSRPGRGEPRFISVGYVDDTQFVRFDSDAASPREEPRAPWIEQEGPEYWDRNT QIYKAQAQTDRESLRNLRGAYNQSEAGSHTLQSMYGCDVGPDGRLLRGHDQYAYDGKDYIAL NEDLRSWTAADTAAQITQRKWEAAREAEQRRAYLEGECVEWLRRYLENGKDKLERADPPKTH VTHHPISDHEATLRCWALGFYPAEITLTWQRDGEDQTQDTELVETRPCGDRTFQKWAAVVVPS GEEQRYTCHVQHEGLPKPLTLRWEP (SEQ ID NO:305), where amino acid 84 is Ala and amino acid 236 is Cys. In some cases, the Cys-236 forms an interchain disulfide bond with Cys-12 of a variant 32M polypeptide that comprises an R12C substitution.

### HLA-B (Y84C; A139C)

[0104] In some cases, the MHC Class I heavy chain polypeptide comprises Y84C and A139C substitutions. For example, in some cases, the MHC Class I heavy chain polypeptide comprises an amino acid sequence having at least 75%, at least 80%, at least 85%, at least 90%, at least 95%, at least 98%, at least 99%, or 100%, amino acid sequence identity to the following human HLA-B heavy chain (Y84C; A139C) amino acid sequence: GSHSMRYFYTSVSRPGRGEPREISVGYVDDTQFVRFDSDAASPREEPRAPWIEQEGPEYWORNT QIYKAQAQTDRESLRNLRGCYNQSEAGSHTLQSMYGCDVOPDGRLLRGLIDQYAYDGKDYIAL NEDLRSWTAADTCAQITQRKWEAAREAEQRRAYLEGECVEWLRRYLENGKDKLERADPPKTH VTIMPISDHEATLRONALGFYPAEITLTWQRDGEDQTQDTELVETRPAGDRTFQKWAAVVVPS GEEQRYTCHVQHEGLPKPLTLRWEP (SEQ ID NO:306), where amino acid 84 is Cys and amino acid 139 is Cys. In some cases, Cys-84 forms an interchain disulfide bond with Cys-139.

### HLA-B*0702

[0105] As an example, in some cases, a MHC Class I heavy chain polypeptide present in a TMMP of the present disclosure comprises an amino acid sequence of HLA-B*0702 (SEQ ID NO:207) in FIG. 10A, or a sequence having at least 75% (e.g., at least 80%, at least 85%, at least 90%, at least 95%, at least 98%, at least 99%) or 100%, amino acid sequence identity to all or part (e.g., 50, 75, 100, 150, 200, or 250 contiguous amino acids) of that sequence (e.g., it may comprise 1-25, 1-5, 5-10, 10-15, 15-20, 20-25, or 25-30 amino acid insertions, deletions, and/or substitutions). In some cases, where the HLA-B heavy chain polypeptide of TMMP of the present disclosure has less than 100% identity to the sequence labeled HLA-B in FIG. 8, or labeled “B*0702 in FIG. 10A, it may comprise a mutation at one or more of positions 84, 139 and/or 236 selected from: a tyrosine to alanine substitution at position 84 (Y84A); a tyrosine to cysteine substitution at position 84 (Y84C); an alanine to cysteine at position 139 (A139C); and an alanine to cysteine substitution at position 236 (A236C). In some cases, the HLA-B heavy chain polypeptide of TMMP of the present disclosure comprises Y84A and A236C substitutions. In some cases, the HLA-B*0702 heavy chain polypeptide of TMMP of the present disclosure comprises Y84C and A139C substitutions. In some cases, the HLA-B heavy chain polypeptide of TMMP of the present disclosure comprises Y84C, A139C, and A236C substitutions.

### HLA-C

[0106] In some cases, a TMMP of the present disclosure comprises an HLA-C heavy chain polypeptide. The HLA-C heavy chain polypeptide, or portions thereof, that may be that may be incorporated into a TMMP of the present disclosure include, but are not limited to, the alleles: C*0102, C*0303, C*0304, C*0401, C*0602, C*0701, C*0801, and C*1502, which are aligned without all, or substantially all, of the leader, transmembrane and cytoplasmic sequences in FIG. 11A. Any of those alleles may comprise a mutation at one or more of positions 84, 139 and/or 236 (as shown in FIG. 11A) selected from: a tyrosine to alanine substitution at position 84 (Y84A); a tyrosine to cysteine substitution at position 84 (Y84C); an alanine to cysteine substitution at position 139 (A139C); and an alanine to cysteine substitution at position 236 (A236C). In addition, an HLA-C polypeptide comprising an amino acid sequence having at least 75% (e.g., at least 80%, at least 85%, at least 90%, at least 95%, at least 98%, at least 99%) or 100% amino acid sequence identity to all or part (e.g., 50, 75, 100, 150, 200, or 250 contiguous amino acids) of the sequence of those HLA-C alleles may also be employed (e.g., it may comprise 1-25, 1-5, 5-10, 10-15, 15-20, 20-25, or 25-30 amino acid insertions, deletions, and/or substitutions).

[0107] In some cases, a TMMP of the present disclosure comprises an HLA-C heavy chain polypeptide comprising the following HLA-C consensus amino acid sequence:

[0108] X1SHSMX2YFX3TAVSX4PGRGEPX5FIX6VGYVDDTQFVX7FDSDAASPRGEPRX 8PWVEQEGPEYWDRETQX9YKRQAQX10DRVX11LRX12LRGIYNQSEX13X14SHX15X16QX17MX18GCDX19GPDGRLLRGX20X21QX22AYDGKDYIALNEDLRSWTAADTAAQITQRKX23EA ARX24AEQX25RAYLEGX26CVEWLRRYLX27NGKX28TLQRAEX29PKTHVTHHPX30SDHEAT LRCWALGFYPAEITLTWQX31DGEDQTQDTELVETRPAGDGTFQKWAAVX32VPSGX33EQRYT CHX34QHEGLX35EPLTLX36WX37P (SEQ ID NO:31), wherein X1 is C or Cr; X2 is R or K; X3 is F, Y, S, or D; X4 is R or W; X5 is H or R; X6 is A or S; X7 is Q or R; X8 is A or E; X9 is N or K; X10 is T or A; X11 is S or N; X12 is N or K; X13 is A or D; X14 is G or R; X15 is T or 1; X16 is L or 1; X17 is W or R; X18 is C, Y, F, or S; X19 is or V; X20 is Y or H; X21 is D or N; X22 is Y, F, S, or L; X23 is L or W; X24 is E, A, Or T; X25 is R, L, or W; X26 is L or T; X27 is E OR K; X28 is L or K; X29 is H or P; X30 is R or V; X31 is W or R; X32 is V or M; X33 is F. or Q; X34 is M or V; X35 is P or Q; X36 is R or S; and X37 is P or G.

[0109] As an example, an MHC Class I heavy chain polypeptide of a TMMP of the present disclosure can comprise an amino acid sequence having at least 75%, at least 80%, at least 85%, at least 90%, at least 95%, at least 98%, at least 99%, or 100%, amino acid sequence identity to the following human HLA-C heavy chain amino acid sequence:

(SEQ ID NO: 307)
CSHSMRYFDTAVSRPGRGEPRFISVGYVDDTQFVREDSDAASPRGEPRAP
WVEQEGPEYWDRETQNYKRQAQADRVSLRNLRGYYNQSEDGSHTLQRMYG
CDLGPDGRLLRGYDQSAYDGKDYIALNEDLRSWTAADTAAQITQRKLEAA
RAAEQLRAYLEGTCVEWLRRYLENGKETLQRAEPPKTHVTHHPLSDHEAT
LRCWALGFYPAEITLTWQRDGEDQTQDTELVETRPAGDGTFQKWAAVVVP
SGQEQRYTCHMQHEGLQEPLTLSWEP.

### HLA-C (Y84A; A236C)

[0110] As one non-limiting example, in some cases, the MHC Class I heavy chain polypeptide is an HLA-C polypeptide that comprises Y84A and A236C substitutions. For example, in some cases, the MHC Class I heavy chain polypeptide comprises an amino acid sequence having at least 75%, at least 80%, at least 85%, at least 90%, at least 95%, at least 98%, at least 99%, or 100%, amino acid sequence identity to the following human HLA-C heavy chain (Y84A; A236C) amino acid sequence: CSHSMRYFDTAVSRPGRGEPRFISVGYVDDTQFVREDSDAASPRGEPRAPWVEQEGPEYWDRE TQNYKRQAQADKVSLRNLRGAYNQSEDGSHTLQRMYGCDLGPDGRLLRGYDQSAYDGKDYI ALNEDLRSWTAADTAAQITQRKLEAARAAEQLRAYLEGTCVEWLRRYLENGKETLQRAEPPKT HVTIMPLSDHEATLRCWALCiFYPAEITLTWQRDGEDQTQDTELVETRPCGDGTFQKWAAVVV PSGQEQRYTCHMQHEGLQEPLTLSWEP (SEQ ID NO:308), where amino acid 84 is Ala and amino acid 236 is Cys. In some cases, the Cys-236 forms an interchain disulfide bond with Cys-12 of a variant β2M polypeptide that comprises an R12C substitution.

### HLA-C (Y84C; A139C)

[0111] In some cases, the MHC Class I heavy chain polypeptide comprises Y84C and A139C substitutions. For example, in some cases, the MHC Class I heavy chain polypeptide comprises an amino acid sequence having at least 75%, at least 80%, at least 85%, at least 90%, at least 95%, at least 98%, at least 99%, or 100%, amino acid sequence identity to the following human HLA-C heavy chain (Y84C; A139C) amino acid sequence: CSIISMRYFDTAVSRPGRGEPRFISVGYVDDTQFVRFDSDAASPRGEPRAPWVEQEGPEYWDRE TQNYKRQAQADRVSLRNLRGCYNQSEDGSIITLQRMYGCDLGPDGRLLRGYDQSAYDGKDYI ALNEDLRSWTAADTCAQITQRKLEAARAAEQLRAYLEGTCVEWLRRYLENGKETLQRAEPPKT HVTHHPLSDHEATLRCWALGFYPAEITLTWQRDGEDQTQDTELVETRPAGDGTFQKWAAVVV PSGQEQRYTCHMQIIEGLQEPLTLSWEP (SEQ ID NO:397), where amino acid 84 is Cys and amino acid 139 is Cys. In some cases, Cys-84 forms an intrachain disulfide bond with Cys-139.

### HLA-C*0701

[0112] In some cases, a MHC Class I heavy chain polypeptide of a TMMP of the present disclosure comprises an amino acid sequence of HLA-C*0701 of FIG. 11A (labeled HLA-C in FIG. 8), or an amino acid sequence having at least 75% (e.g., at least 80%, at least 85%, at least 90%, at least 95%, at least 98%, at least 99%) or 100% amino acid sequence identity to all or part (e.g., 50, 75, 100, 150, 200, or 250 contiguous amino acids) of that sequence (e.g., it may comprise 1-25, 1-5, 5-10, 10-15, 15-20, 20-25, or 25-30 amino acid insertions, deletions, and/or substitutions). In some cases, where the HLA-C heavy chain polypeptide of a TMMP of the present disclosure has less than 100% identity to the sequence labeled HLA-C*0701 in FIG. 11A. it may comprise a mutation at one or more of positions 84, 139 and/or 236 selected from: a tyrosine to alanine substitution at position 84 (Y84A); a tyrosine to cysteine substitution at position 84 (Y84C); an alanine to cysteine at position 139 (A139C); and an alanine to cysteine substitution at position 236 (A236C). In some cases, the HLA-C heavy chain polypeptide of a TMMP of the present disclosure comprises Y84A and A236C substitutions. In some cases, the HLA-C*0701 heavy chain polypeptide of a T-Cell-MMP or its epitope conjugate comprises Y84C and A139C substitutions. In some cases, the HLA-C heavy chain polypeptide of a TMMP of the present disclosure comprises Y84C, A139C, and A236C substitutions.

### Non-Classical HLA-E, -F, And -G MHC Class I Heavy Chains

[0113] In some cases, a TMMP of the present disclosure comprises a non-classical MHC Class I heavy chain polypeptide. Among the non-classical HLA heavy chain polypeptides, or portions thereof, that may be that may be incorporated into a TMMP of the present disclosure include, but are not limited to, those of HLA-E, -F, and -G alleles. Amino acid sequences for HLA-E, -F, and -G heavy chain polypeptides, (and the HLA-A, B and C alleles) may be found on the world wide web hla.alleles.org/nomenclature/index.html, the European Bioinformatics Institute (www(dot)ebi(dot)ac(dot)uk), which is part of the European Molecular Biology Laboratory(EMBL), and at the National Center for Biotechnology Information (www(dot)ncbi(dot)nlm(dot)nih(dot)gov).

[0114] Non-limiting examples of suitable HLA-E alleles include, but are not limited to, HLA-E*0101 (HLA-E*01:01:01:01), HLA-E*01:03(HLA-E*01:03:01:01), HLA-E*01:04, HLA-E*01:05, HLA-E*01:06, HLA-E*01:07, HLA-E*01:09, and HLA-E*01:10. Non-limiting examples of suitable HLA-F alleles include, hut are not limited to, HLA-F*0101 (HLA-F*01:01:01:01), HLA-F*01:02, HLA-F*01:03(HLA-F*01:03:01:01), HLA-F*01:04, HLA-F*01:05, and HLA-F*01:06. Non-limiting examples of suitable HLA-G alleles include, but are not limited to, HLA-G*0101 (HLA-G*01:01:01:01), HLA-G*01;02, HLA-G*01:03(HLA-G*01:03:01:01), HLA-G*01:04 (HLA-G*01:04:01:01), HLA-G*01:06, HLA-G*01:07, HLA-G*01:08, HLA-G*01:09; HLA-G*01:10, HLA-G*01:10, HLA-G*01:11, HLA-G*01:12, HLA-G*01:14, HLA-G*01:15, HLA-G*01:16, HLA-G*01:18: HLA-G*01:19, HLA-G*01:20, and HLA-G*01:22. Consensus sequences for those HLA E, —F and -G alleles without all, or substantially all, of the leader, transmembrane and cytoplasmic sequences are provided in FIG. 12, and aligned with consensus sequences of the above-mentioned -B and -C alleles in FIG. 13.

[0115] FIG. 12 provides a consensus sequence for each of HLA-E, -F, and -G with the variable aa positions indicated as “X” residues sequentially numbered and the locations of aas 84, 139 and 236 double underlined.

[0116] FIG. 13 provides an alignment of the consensus amino acid sequences for HLA-A, -B, -C, -E, -F, and -G, which are given in FIGS. 9-13. Variable residues in each sequence are listed as “X” with the sequential numbering removed. As indicated in FIG. 8, the locations of aas 84, 139 and 236 are indicated with their flanking five-amino acid clusters that may be replaced by 1 to 5 amino acids selected independently from (i) any naturally occurring amino acid or (ii) any naturally occurring amino acid except proline or glycine are also shown.

[0117] Any of the above-mentioned HLA-E. —F, and/or -G alleles may comprise a substitution at one or more of positions 84, 139 and/or 236 as shown in FIG. 13 for the consensus sequences. In some cases, the substitutions may be selected from a: position 84 tyrosine to alanine (Y84A) or cysteine (Y84C), or, in the case of HLA-F, an R84A or R84C substitution; a position 139 alanine to cysteine (A139C), or, in the case of HLA-F, a V139C; and an alanine to cysteine substitution at position 236 (A236C). In addition, an HLA-E, -F and for -G sequence having at least 75% (e.g., at least 80%, at least 85%, at least 90%, at least 95%, at least 98%, at least 99%) or 100% amino acid sequence identity to all or part (e.g., 50, 75, 100, 150, 200, or 250 contiguous amino acids) of any of the consensus sequences of set forth in FIG. 13 may also be employed (e.g., the sequences may comprise 1-25, 1-5, 5-10, 10-15, 15-20, 20-25, or 25-30 amino acid insertions, deletions, and/or substitutions in addition to changes at variable residues listed therein).

### Mouse H2K

[0118] In some cases, a MHC Class I heavy chain polypeptide present in a TMMP of the present disclosure comprises an amino acid sequence of MOUSE H2K (SEQ ID NO:45) (MOUSE H2K in FIG. 8), or a sequence having at least 75%, at least 80%, at least 85%, at least 90%, at least 95%, at least 98%, at least 99%, or 100% amino acid sequence identity to all or part (e.g., 50, 75, 100, 150, 200, or 250 contiguous amino acids) of that sequence (e.g., it may comprise 1-25, 1-5, 5-10, 10-15, 15-20, 20-25, or 25-30 amino acid insertions, deletions, and/or substitutions). In some cases, where the MOUSE H2K heavy chain polypeptide of a TMMP of the present disclosure has less than 100% identity to the sequence labeled MOUSE H2K in FIG. 8, it may comprise a mutation at one or more of positions 84, 139 and/or 236 selected from: a tyrosine to alanine at position 84 (Y84A); a tyrosine to cysteine at position 84 (Y84C); an alanine to cysteine at position 139 (A139C); and an alanine to cysteine substitution at position 236 (A236C). In some cases, the MOUSE H2K heavy chain polypeptide of a TMMP of the present disclosure comprises Y84A and A236C substitutions. In some cases, the MOUSE H2K heavy chain polypeptide of a TMMP of the present disclosure comprises Y84C and A139C substitutions. In some cases, the MOUSE 112K heavy chain polypeptide of a TMMP of the present disclosure comprises Y84C, A139C and A236C substitutions.

### Exemplary Combinations

[0119] Table 1, below, presents various combinations of MHC Class 1 heavy chain sequence modifications that can be incorporated in a TMMP of the present disclosure.

TABLE 1

| | | | Specific |
|---|---|---|---|
| | | Sequence | Substitutions at aa |
| | HLA Heavy | Identity | positions 84, 139 |
| Entry | Chain Sequence | Range [symbol] | and/or 236 |
| 1 | HLA-A | 75%-99.8%, 80%-99.8%, 85%-99.8%, | None; Y84C; Y84A; |
| | Consensus | 90%-99.8%, 95%-99.8%, 98%-99.8%, | A139C; A236C; |
| | (FIG. 9B) | or 99%-99.8%; or 1-25, 1-5, 5-10, 10- | (Y84A & A236C); |
| | | 15, 15-20, or 20-25 aa insertions, | (Y84C & A139C); or |
| | | deletions, and/or substitutions (not | (Y84C, A139C & |
| | | counting variable residues) | A236C) |
| 2 | A*0101, A*0201, | 75%-99.8%, 80%-99.8%, 85%-99.8%, | None; Y84C; Y84A; |
| | A*0301, A*1101, | 90%-99.8%, 95%-99.8%, 98%-99.8%, | A139C; A236C; |
| | A*2402, A*2301, | or 99%-99.8%; or 1-25, 1-5, 5-10, 10- | (Y84A & A236C); |
| | A*2402, A*2407, | 15, 15-20, or 20-25 aa insertions, | (Y84C & A139C); or |
| | A*3303, or | deletions, and/or substitutions | (Y84C, A139C & |
| | A*3401 | | A236C) |
| | (FIG. 9A) | | |
| 3 | HLA-B | 75%-99.8%, 80%-99.8%, 85%-99.8%, | None; Y84C; Y84A; |
| | Consensus | 90%-99.8%, 95%-99.8%, 98%-99.8%, | A139C; A236C; |
| | (FIG. 10B) | or 99%-99.8%; or 1-25, 1-5, 5-10, 10- | (Y84A & A236C); |
| | | 15, 15-20, or 20-25 aa insertions, | (Y84C & A1390; or |
| | | deletions, and/or substitutions (not | (Y84C, A139C & |
| | | counting variable residues) | A236C) |
| 4 | B*0702, B*0801, | 75%-99.8%, 80%-99.8%, 85%-99.8%, | None; Y84C; Y84A; |
| | B*1502, B*3802, | 90%-99.8%, 95%-99.8%, 98%-99.8%, | A139C; A236C; |
| | B*4001, B*4601, | or 99%-99.8%; or 1-25, 1-5, 5-10, 10- | (Y84A & A236C); |
| | or B*5301 | 15, 15-20, or 20-25 aa insertions, | (Y84C & A139C); or |
| | (FIG. 10A) | deletions, and/or substitutions | (Y84C, A139C & |
| | | | A236C) |
| 5 | HLA-C | 75%-99.8%, 80%-99.8%, 85%-99.8%, | None; Y84C; Y84A; |
| | Consensus | 90%-99.8%, 95%-99.8%, 98%-99.8%, | A139C; A236C; |
| | (FIG. 11B) | or 99%-99.8%; or 1-25, 1-5, 5-10, 10- | (Y84A & A236C); |
| | | 15, 15-20, or 20-25 an insertions, | (Y84C & A139C); or |
| | | deletions, and/or substitutions (not | (Y84C, A139C & |
| | | counting variable residues) | A236C) |
| 6 | C*0102, C*0303, | 75%-99.8%, 80%-99.8%, 85%-99.8%, | None; Y84C; Y84A; |
| | C*0304, C*0401, | 90%-99.8%, 95%-99.8%, 98%-99.89, | A139C; A236C; |
| | C*0602, C*0701, | or 99%-99.8%; or 1-25, 1-5, 5-10, 10- | (Y84A & A236C); |
| | C*0801, or | 15, 15-20, or 20-25 an insertions, | (Y84C & A139C); or |
| | C*1502 | deletions, and/or substitutions | (Y84C, A139C & |
| | (FIG. 11A) | | A236C) |
| 7 | HLA-E, F, or G | 75%-99.8%, 80%-99.8%, 85%-99.8%, | None; Y84C; Y84A; |
| | Consensus | 90%-99.8%, 95%-99.8%, 98%-99.89, | A139C; A236C; |
| | (FIG. 12) | or 99%-99.8%; or 1-25, 1-5, 5-10, 10- | (Y84A & A236C); |
| | | 15, 15-20, or 20-25 aa insertions, | (Y84C & A139C); or |
| | | deletions, and/or substitutions (not | (Y84C, A139C & |
| | | counting variable residues) | A236C) |
| 8 | MOUSE H2K | 75%-99.8%, 80%-99.8%, 85%-99.8%, | None; Y84C; Y84A; |
| | (FIG. 8) | 90%-99.8%, 95%-99.8%, 98%-99.8%, | A139C; A236C; |
| | | or 99%-99.8%; or 1-25, 1-5, 5-10, 10- | (Y84A & A236C); |
| | | 15, 15-20, or 20-25 an insertions, | (Y84C & A139C); or |
| | | deletions, and/or substitutions | (Y84C, A139C & |
| | | | A236C) |

[symbol]

The Sequence Identity Range is the permissible range in sequence identity of a MHC-H polypeptide sequence incorporated into a TMMP relative to the corresponding portion of the sequences listed in FIG. 8-13 not counting the variable residues in the consensus sequences.

### Beta-2 Microglobulin

[0120] A β2-microglobulin (β2M) polypeptide of a TMMP of the present disclosure can be a human β2M polypeptide, a non-human primate β2M polypeptide, a murine polypeptide, and the like. In some instances, a β2M polypeptide comprises an amino acid sequence having at least 75%, at least 80%, at least 85%, at least 90%, at least 95%, at least 98%, at least 99%, or 100%, amino acid sequence identity to a β2M amino acid sequence depicted in FIG. 6. In some instances, a β2M polypeptide comprises an amino acid sequence having at least 75%, at least 80%, at least 85%, at least 90%, at least 95%, at least 98%, at least 99%, or 100%, amino acid sequence identity to amino acids 21 to 119 of a β2M amino acid sequence depicted in FIG. 6.

[0121] In some cases, a suitable β2M polypeptide comprises the following amino acid sequence:

(SEQ ID NO: 311)
IQRTPKIQVY SCHPAENGKS NFLNCYVSGF HPSDIEVDLLKNGERIE
KVE HSDLSFSKDW SFYLLYYTEF TPTEKDEYAC RVNHVTLSQP
KIVKWDRDM;

and the HLA Class I heavy chain polypeptide comprises the following amino acid sequence:

[0122] GSHSMRYFFTSVSRPORGEPRFIAVGYVDDTQFVRFDSDAASQRMEPRAPWIEQE GPEYWDGETRKVKAHSQTHRVDL(aa1){C}(aa2)AGHTVQRMYGCDVGSDWRFLRGYFIQYAY DGKDYIALKEDLRSW(aa3)(C)(aa4))HKWEAAHVAEQLRAYLEGTCVEWLRRYLENGKETLQR TDAPKIHMTHHAVSDHEATLRCWALSFYPAEULTWQRDGEDQTQDTEL(aa5)(C)(aa6)QKVVAA VVVPSGQEQRYTCHVQHEGLPKPLTLRWEP (SEQ ID NO:309), where the cysteine residues indicated as (C) form an disulfide bond between the α1 and α2-1 helices and the (C) residue forms a disulfide bond with the β2M polypeptide cysteine at position 12. In the sequence above, “aa1” is “amino acid cluster 1”; “aa2” is “amino acid cluster 2”; “aa3” is “amino acid cluster 3”; “aa4” is “amino acid cluster 4”; “aa5” is “amino acid cluster 5”; and “aa6” is “amino acid cluster 6”; see, e.g., FIG. 10. Each occurrence of aa1, aa2, aa3, aa4, aa5, and aa6 is and independently selected to be 1-5 amino acid residues, wherein the amino acid residues are i) selected independently from any naturally occurring (e.g., encoded) amino acid or ii) any naturally occurring amino acid except praline or glycine.

[0123] In some cases, an WIC polypeptide comprises a single amino acid substitution relative to a reference WIC polypeptide (where a reference WIC polypeptide can be a wild-type MHC polypeptide), where the single amino acid substitution substitutes an amino acid with a cysteine (Cys) residue. Such cysteine residues, when present in an WIC polypeptide of a first polypeptide of a TMMP of the present disclosure, can form a disulfide bond with a cysteine residue present in a second polypeptide chain of a TMMP of the present disclosure.

[0124] In some cases, a first MHC polypeptide in a first polypeptide of a TMMP of the present disclosure, and/or the second MHC polypeptide in the second polypeptide of a TMMP of the present disclosure, includes an amino acid substitution to substitute an amino acid with a cysteine, where the substituted cysteine in the first MHC polypeptide forms a disulfide bond with a cysteine in the second MHC polypeptide, where a cysteine in the first MHC polypeptide forms a disulfide bond with the substituted cysteine in the second MHC polypeptide, or where the substituted cysteine in the first MHC polypeptide forms a disulfide bond with the substituted cysteine in the second MHC polypeptide.

[0125] For example, in some cases, one of following pairs of residues in an HLA β2-microglobulin and an HLA Class I heavy chain is substituted with cysteines (where residue numbers are those of the mature polypeptide): 1) β2M residue 12, HLA Class I heavy chain residue 236; 2) β2M residue 12, HLA Class I heavy chain residue 237; 3) β2M residue 8. HLA Class 1 heavy chain residue 234; 4) β2M residue 10, HLA Class I heavy chain residue 235; 5) β2M residue 24, HLA Class I heavy chain residue 236; 6) β2M residue 28. HLA Class I heavy chain residue 232; 7) β2M residue 98, HLA Class I heavy chain residue 192; 8) β2M residue 99, HLA Class I heavy chain residue 234; 9)β2M residue 3, HLA Class 1 heavy chain residue 120; 10) β2M residue 31, HLA Class I heavy chain residue 96; 11) β2M residue 53, HLA Class I heavy chain residue 35; 12) β2M residue 60, HLA Class I heavy chain residue 96; 13) β2M residue 60, HLA Class I heavy chain residue 122; 14) β2M residue 63, HLA Class I heavy chain residue 27; 15) β2M residue Arg3, HLA Class 1 heavy chain residue Gly120; 16) β2M residue His31, HLA Class 1 heavy chain residue Gln96; 17) β2M residue Asp53, HLA Class I heavy chain residue Arg35; 18) β2M residue Trp60, HLA Class I heavy chain residue Gln96; 19) β2M residue Trp60, HLA Class I heavy chain residue Asp122; 20) β2M residue Tyr63, HLA Class 1 heavy chain residue Tyr27; 21) β2M residue Lys6, HLA Class I heavy chain residue Glu232; 22) β2M residue Gln8, HLA Class I heavy chain residue Arg234; 23) β2M residue Tyr10, HLA Class I heavy chain residue Pro235; 24) β2M residue Ser11, HLA Class I heavy chain residue Gln242; 25) β2M residue Asn24, HLA Class I heavy chain residue Ala236; 26) β2M residue Ser28, HLA Class I heavy chain residue Glu232; 27) β2M residue Asp98, HLA Class I heavy chain residue His192; and 28) β2M residue Met99, HLA Class I heavy chain residue Arg234. The amino acid numbering of the MHC/HLA Class heavy chain is in reference to the mature MHC/HLA Class I heavy chain, without a signal peptide. For example, in some cases, residue 236 of the mature HLA-A amino acid sequence is substituted with a Cys. In some cases, residue 236 of the mature HLA-B amino acid sequence is substituted with a Cys. In some cases, residue 236 of the mature HLA-C amino acid sequence is substituted with a Cys. In some cases, residue 32 (corresponding to Arg-12 of mature β2M) of an amino acid sequence depicted in FIG. 6 is substituted with a Cys.

[0126] In some cases, a β2M polypeptide comprises the amino acid sequence: IQRTPKIQVY SRHPAENGKS NFLNCYVSGF HPSDIEVDLLKNGERIEKVE HSDLSFSKDW SFYLLYYTEF TPTEKDEYAC RVNHVTLSQP KIVKWDRDM (SEQ ID NO:310). In some cases, a β2M polypeptide comprises the amino acid sequence: IQKTPKIQVY SCHPAENGKS NFLNCYVSGF HPSDIEVDLLKNGERIEKVE HSDLSFSKDW SFYLLYYTEF TPTEKDEYAC RVNHVTLSQP KIVKWDRDM (SEQ ID NO:311).

[0127] In some cases, an HLA Class I heavy chain polypeptide comprises the amino acid sequence:

(SEQ ID NO: 297)
GSHSMRYFFTSVSRPGRGEPREIAVGYVDDTQFVRFDSDAASQRMEPRAP
WIEQEGPEYWDGETRKVKAHSQTHRVDLGTLRGYYNQSEAGSHTVQRMYG
CDVGSDWRFLRGYHQYAYDGKDYIALKEDLRSWTAADMAAQTTKHKWEAA
HVAEQLRAYLEGTCVEWLRRYLENGKETLQRTDAPKTHMTHHAVSDHEAT
LRCWALSFYPAEITLTWQRDGEDQTQDTELVETRPAGDGTFQKWAAVVVP
SGQEQRYTCHVQHEGLPKPLTLRWEP.

[0128] In some cases, an HLA Class I heavy chain polypeptide comprises the amino acid sequence:

(SEQ ID NO: 312)
GSHSMRYFFTSVSRPGRGEPRFIAVGYVDDTQFVRFDSDAASQRMEPRAP
WIEQEGPEYWDGETRKVKAHSQTHRVDLGTLRGYYNQSEAGSHTVQRMYG
CDVGSDWRFLRGYHQYAYDGKDYIALKEDLRSWTAADMAAQTTKHKWEAA
HVAEQLRAYLEGTCVEWLRRYLENGKETLQRTDAPKTHMTHHAVSDHEAT
LRCWALSFYPAEITLTWQRDGEDQTQDTELVETRPCGDGTFQKWAAVVVP
SGQEQRYTCHVQHEGLPKPLTLRWEP.

[0129] In some cases, an HLA Class I heavy chain polypeptide comprises the amino acid sequence:

(SEQ ID NO: 313)
GSHSMRYFFTSVSRPGRGEPRFIAVGYVDDTQFVRFDSDAASQRMEPRAP
WIEQEGPEYWDGETRKVKAHSQTHRVDLGTLRGAYNQSEAGSHTVQRMYG
CDVGSDWRFLRGYHQYAYDGKDYIALKEDLRSWTAADMAAQTTKHKWEAA
HVAEQLRAYLEGTCVEWLRRYLENGKETLQRTDAPKTHMTHHAVSDHEAT
LRCWALSFYPAEITLTWQRDGEDQTQDTELVETRPCGDGTFQKWAAVVVP
SGQEQRYTCHVQHEGLPKPLTLRWE.

[0130] In some cases, the β2M polypeptide comprises the following amino acid sequence:

[0131] IQRTPKIQVY SCHPAENGKS NFLNCYVSGF HPSDIEVDLLKNGERIEKVE HSDLSFSKDW SFYLLYYTEF TPTEKDEYAC RVNHVTLSQP KIVKWDRDM (SEQ ID NO:311); and the HLA Class I heavy chain polypeptide of a TMMP of the present disclosure comprises the following amino acid sequence:

[0132] GSHSMRYFFTSVSRPGRGEPRFIAVGYVDDTQFVRFOSDAASQRMEPRAPWIEQE GPEYWDGETRKVKAHSQTHRVDLGTLRGYYNQSEAGSHTVQRMYGCDVGSDWRFLRGYHQY AYDGKDYIALKEDLRSWTAADMAAQTTKHKWEAAHVAEQLRAYLEGTCVEWLRRYLENGKE TLQRTDAPKTHMTHHAVSDHEATLRCWALSFYPAEITLTWQRDGEDQTQDTELVETRPCGDGT FQKWAAVVVPSGQEQRYTCHVQHEGLPKPLTLRWEP (SEQ ID NO:312), where the Cys residues that are underlined and in bold form a disulfide bond with one another in the TMMP.

[0133] In some cases, the β2M polypeptide comprises the amino acid sequence:

(SEQ ID NO: 314)
IQRTPKIQVYSCHPAENGKSNFLNCYVSGFHPSDIEVDLLKNGERIEKVE
HSDLSFSKDWSFYLLYYTEFTPTEKDEYACRVNHVTLSQPKIVKWDRDM.

[0134] In some cases, the first polypeptide and the second polypeptide of a TMMP of the present disclosure are disulfide linked to one another through: i) a Cys residue present in a linker connecting the peptide epitope and a β2M polypeptide in the first polypeptide chain; and ii) a Cys residue present in an MHC Class I heavy chain in the second polypeptide chain. In some cases, the Cys residue present in the MHC Class I heavy chain is a Cys introduce as a Y84C substitution. In some cases, the linker connecting the peptide epitope and the β2M polypeptide in the first polypeptide chain is GCGGS(G4S)n (SEQ ID NO:315), where n is 1, 2, 3, 4, 5, 6, 7, 8, or 9. For example, in some cases, the linker comprises the amino acid sequence GCGGSGGGGSGGGGSGGGGS (SEQ ID NO:316). As another example, the linker comprises the amino acid sequence GCGGSGGGGSGGGGS (SEQ ID NO:317). Examples of disulfide-linked first and second polypeptides of a TMMP of the present disclosure are depicted schematically in FIG. 2A-2F.

### Multiple Disulfide Bonded TMMPs

[0135] In some cases, the first polypeptide and the second polypeptide of a TMMP of the present disclosure are linked to one another by at least two disulfide bonds (i.e., two interchain disulfide bonds). Examples of such multiple disulfide-linked TMMP are depicted schematically in FIGS. 14A and 14B and FIG. 15A-15C. In addition, where a TMMP of the present disclosure comprises an IgFc polypeptide, heterodimeric TMMP can be dimerized, such that disulfide bonds link the IgFc polypeptides in the two heterodimeric TMMPs. Such an arrangement is depicted schematically in FIGS. 14C and 14D, where disulfide bonds are represented by dashed lines. Unless otherwise stated, the at least two disulfide bonds described in the multiple disulfide-linked TMMPPs in this section are not referring to disulfide bonds linking IOC polypeptides in dimerized TMMPs.

[0136] As noted above, in some cases, the first polypeptide and the second polypeptide of a TMMP of the present disclosure are linked to one another by at least two disulfide bonds (i.e., two interchain disulfide bonds). For example, in some instances, the first polypeptide and the second polypeptide of a TMMP of the present disclosure are linked to one another by 2 interchain disulfide bonds. As another example, in some instances, the first polypeptide and the second polypeptide of a TMMP of the present disclosure are linked to one another by 3 interchain disulfide bonds. As another example, in some instances, the first polypeptide and the second polypeptide of a TMMP of the present disclosure are linked to one another by 4 interchain disulfide bonds.

[0137] In some cases where a peptide epitope in a first polypeptide of a TMMP of the present disclosure is linked to a β2M polypeptide by a linker comprising a Cys, at least one of the at least two disulfide bonds links a Cys in the linker to a Cys in an MHC Class I heavy chain in the second polypeptide. In some cases, where a peptide epitope in a first polypeptide of a TMMP of the present disclosure is linked to an MHC Class I heavy chain polypeptide by a linker, at least one of the at least two disulfide bonds links a Cys in the linker to a Cys in a β2M polypeptide present in the second polypeptide.

[0138] In some cases, a multiple disulfide-linked TMMP of the present disclosure (e.g., a double disulfide-linked TMMP) exhibits increased stability, compared to a control TMMP that includes only one of the at least two disulfide bonds. In some cases, a multiple disulfide-linked TMMP (e.g., a double disulfide-linked TMMP) of the present disclosure exhibits increased in vitro stability, compared to a control TMMP that includes only one of the at least two disulfide bonds. For example, in some cases, a multiple disulfide-linked TMMP of the present disclosure (e.g., a double, disulfide-linked TMMP) exhibits at least 5%, at least 10%, at least 15%, at least 20%, at least 25%, at least 50%, at least 2-fold, at least 5-fold, or at least 10-fold, greater in vitro stability, compared to a control TMMP that includes only one of the at least two disulfide bonds.

[0139] Whether a multiple disulfide-linked TMMP of the present disclosure exhibits increased in vitro stability, compared to a control TMMP that includes only one of the at least two disulfide bonds, can be determined by measuring the amount disulfide-linked heterodimeric TMMP present in a sample over time and/or under a specified condition and/or during purification of the TMMP.

[0140] For example, in some cases, a multiple disulfide-linked TMMP a double disulfide-linked TMMP) of the present disclosure exhibits at least 5%, at least 10%, at least 15%, at least 20%, at least 25%, at least 50%, at least 2-fold, at least 5-fold, or at least 10-fold, greater in vitro stability, compared to a control TMMP that includes only one of the at least two disulfide bonds, when the TMMP is stored at 37° C. for a period of time (e.g., for a period of time of from about 1 week to about 2 weeks, front about 2 weeks to about 4 weeks, Or from about 4 weeks to about 2 months). For example, in some cases, the amount of disulfide-linked heterodimeric WNW remaining after storing a multiple disulfide-linked TMMP (e.g., a double disulfide-linked TMMP) of the present disclosure in vitro at 37° C., for 28 days is at least at least 5%, at least 10%, at least 15%, at least 20%, at least 25%, at least 50%, at least 2-fold, at least 5-fold, or at least 10-fold, greater than the amount of disulfide-linked heterodimeric TMMP remaining after storing a control TMMP (a TMMP that includes only one of the at least two disulfide bonds present in the multiple disulfide-linked TMMP) in vitro at 37° C. for 28 days.

[0141] In some cases, a multiple disulfide-linked. TMMP of the present disclosure exhibits increased in vivo stability, compared to a control TMMP that includes only one of the at least two disulfide bonds. For example, in some cases, a multiple disulfide-linked TMMP of the present disclosure exhibits at least 5%, at least 10%, at least 15%, at least 20%, at least 25%, at least 50%, at least 2-fold, at least 5-fold, or at least 10-fold, greater in vivo stability, compared to a control TMMP that includes only one of the at least two disulfide bonds.

[0142] In some cases, the presence of two disulfide bonds in a multiple disulfide-linked TMMP of the present disclosure (e.g., a double disulfide-linked TMMP) provides for increased production of disulfide-linked heterodimeric TMMP, compared to the amount of disulfide-linked heterodimeric TMMP produced when the TMMP is a control TMMP that includes only one of the at least two disulfide bonds. For example, a multiple disulfide-linked TMMP of the present disclosure (e.g., a double disulfide-linked TMMP) can be produced in a mammalian cell in in vitro cell culture, where the mammalian cell is cultured in a liquid cell culture medium. The TMMP can be secreted into the cell culture medium. The cells can be lysed, generating a cell lysate, and the TMMP can be present in the cell lysate. The TMMP can be purified from the cell culture medium and/or the cell lysate. For example, where the TMMP comprises an IgG1 Fe polypeptide, the cell culture medium and/or the cell lysate can be contacted with immobilized protein A (e.g., the cell culture medium and/or the cell lysate can be applied to a protein A column, where protein A is immobilized onto beads). TMMP present in the cell culture medium and/or the cell lysate becomes bound to the immobilized protein A. After washing the column to remove unbound materials, the bound TMMP is elated, generating a protein A eluate. The amount of disulfide-linked heterodimeric TMMP present in the protein A eluate is a least 0.5%, at least 1%, at least 2%, at least 3%, at least 4%, at least 5%, at least 6%, at least 7%, at least 8%, at least 9%, or at least 10%, higher than the amount of disulfide-linked heterodimeric TMMP present in the protein A eluate when the TMMP is a control TMMP that includes only one of the at least two disulfide bonds present in the multiple disulfide-linked TMMP (e.g., a double disulfide-linked TMMP). In some cases, the percent of the total TMMP protein in the eluate that is non-aggregated disulfide-linked heterodimeric TMMP is at least 70%, at least 75%, at least 80%, at least 85%, at least 90%, at least 95%, or at least 99% The protein A eluate can be subjected to size exclusion chromatography (SEC) and/or one or more other additional purification steps.

[0143] In some cases, a T-cell modulatory multimeric polypeptide of the present disclosure comprises at least one heterodimer comprising: a) a first polypeptide comprising: i) an HPV peptide epitope, where the HPV peptide has a length of at least 4 amino acids (e.g., from 4 amino acids to 25 amino acids; e.g., the HPV peptide has a length of 4, 5, 6, 7, 8, 9, 10-15, 15-20, or 20-25 amino acids); and ii) first MHC polypeptide; h) a second polypeptide comprising a second MHC polypeptide, and c) at least one immunomodulatory polypeptide, where the first and/or the second polypeptide comprises the immunomodulatory polypeptide, and where the heterodimer comprises at least two disulfide bonds (e.g., two disulfide bonds) between the first polypeptide and the second polypeptide (e.g., the heterodimer comprises: i) a first disulfide bond linking the first polypeptide and the second polypeptide; and ii) a second disulfide bond linking the first polypeptide and the second polypeptide). Expressed another way, the first polypeptide comprises a first Cys residue that forms a disulfide bond (a first disulfide bond) with a first Cys residue in the second polypeptide; and the first polypeptide comprises a second Cys residue that forms a disulfide bond (a second disulfide bond) with a second Cys residue in the second polypeptide.

[0144] In some cases, a TMMP of the present disclosure comprises: a) a first polypeptide comprising, in order from N-terminus to C-terminus: i) a peptide epitope; ii) a peptide linker; and iii) β2M polypeptide; and h) a second polypeptide comprising an WIC Class I heavy chain polypeptide, where one or both of the first and the second polypeptides comprises at least one immunomodulatory Polypeptide, where the TMMP comprises: a) a first disulfide linkage between: i) a Cys present in the linker between the peptide epitope and the β2M polypeptide; and ii) a first Cys introduced into the MHC Class I heavy chain polypeptide; and b) at least a second disulfide linkage between the first polypeptide and the second polypeptide, where the at least a second disulfide linkage is between: a Cys in the first polypeptide that is C-terminal to the Cys present in the linker; and ii) a Cys in the second polypeptide that is C-terminal to the first Cys introduced into the MHC Class I heavy chain polypeptide.

[0145] In some cases, a first and a second disulfide bond-forming Cys residues in a first or a second polypeptide of a TMMP of the present disclosure are from about 10 amino acids to about 200 amino acids apart from one another. For example, in some cases, a first and a second disulfide bond-forming Cys residues in a first or a second polypeptide of a TMMP are from about 10 amino acids (aa) to about 15 aa, from about 15 aa to about 20 aa, from about 20 aa to about 25 aa, from about 25 aa to about 30 aa, from about 30 aa to about 40 aa, from about 40 aa to about 50 aa, from about 50 aa to about 60 aa, from about 60 aa to about 70 aa, from about 70 aa to about 80 aa, from about 80 aa to about 90 aa, from about 90 aa to about 100 aa, from about 100 aa to about 110 aa, from about 110 aa to about 120 aa, from about 120 aa to about 130 aa, from about 130 aa to about 140 aa, from about 140 aa to about 150 aa, from about 150 aa to about 160 au, from about 160 aa to about 170 aa, from about 170 aa to about 180 aa, from about 180 aa to about 190 aa, or from about 190 aa to about 200 aa.

[0146] As an example, in some cases, the first and second disulfide bond-forming Cys residues in the first polypeptide of a TMMP of the present disclosure are from about 10 amino acids to about 80 amino acid residues apart from one another. For example, in some cases, the second disulfide bond-forming Cys residue in the first polypeptide is from about 10 amino acids to about 80 amino acids (e.g., from about 10 amino acids (aa) to about 15 aa, from about 15 aa to about 20 aa, from about 20 aa to about 25 aa, from about 25 aa to about 30 aa, from about 30 aa to about 40 aa, from about 40 aa to about 50 aa, from about 50 aa to about 60 aa, from about 60 aa to about 70 aa, or from about 70 aa to about 80 aa)C-terminal to the first disulfide bond-forming Cys residue in the first polypeptide. In some cases, the second disulfide bond-forming Cys residue in the first polypeptide is 10 aa, 11 aa, 12 aa, 13 aa, 14 aa, 15 aa, 16 aa, 17 aa, 18 aa, 19 aa, 20 aa, 21 aa, 22 aa, 23 aa, 24 aa, or 25 aa, C-terminal to the first disulfide bond-forming Cys residue in the first polypeptide. In some cases, the second disulfide bond-forming Cys residue in the first polypeptide is 15 aa C-terminal to the first disulfide bond-forming Cys residue in the first polypeptide. In some cases, the second disulfide bond-forming Cys residue in the first polypeptide is 20 aa C-terminal to the first disulfide bond-forming Cys residue in the first polypeptide. In some cases, the second disulfide bond-forming Cys residue in the first polypeptide is 25 aa C-terminal to the first disulfide bond-forming Cys residue in the first polypeptide.

[0147] As another example, in some cases, the first and second disulfide bond-forming Cys residues in the second polypeptide of a TMMP of the present disclosure are from about 140 amino acids to about 160 amino acids apart from one another. For example, in some cases, the second disulfide bond-forming Cys residue in the second polypeptide is from about 140 amino acids to about 160 amino acids C-terminal to the first disulfide bond-forming Cys residue in the second polypeptide. In some cases, the second disulfide bond-forming Cys residue in the second polypeptide is 140 amino acids (aa), 141 aa, 142 aa, 143 aa, 144 aa, 145 aa, 146 aa, 147 aa, 148 aa, 149 aa, 150 aa, 151 aa, 152 aa, 153 aa, 154 aa, 155 aa, 156 aa, 157 aa, 158 aa, 159 aa, or 160 aa, C-terminal to the first disulfide bond-forming Cys residue in the second polypeptide.

[0148] A multiple disulfide-linked TMMP of the present disclosure (e.g., a double disulfide-linked TMMP) can comprise, for example: a) a first polypeptide comprising: i) an HPV peptide (e.g., an HPV peptide of from 4 amino acids to about 25 amino acids); and ii) a first MHC polypeptide, where the first polypeptide comprises a peptide linker between the HPV peptide and the first MHC polypeptide, where the peptide linker comprises a Cys residue, and where the first MHC polypeptide is a β2M polypeptide that comprises an amino acid substitution that introduces a Cys residue; b) and a second polypeptide comprising a second MHC polypeptide, where the second MHC polypeptide is a Class I heavy chain comprising a Y84C substitution and an A236C substitution, based on the amino acid numbering of HLA-A*0201 (depicted in FIG. 9A), or at corresponding positions in another Class I heavy chain allele, where the TMMP comprises a disulfide bond between the Cys residue in the peptide linker and the Cys residue at amino acid position 84 of the Class I heavy chain or corresponding position of another Class I heavy chain allele, and where the TMMP comprises a disulfide bond between the introduced Cys residue in the 132M polypeptide and the Cys at amino acid position 236 of the Class I heavy chain or corresponding position of another Class I heavy chain allele; and c) at least one immunomodulatory polypeptide, where the first and/or the second polypeptide comprises the at least one immunomodulatory polypeptide. Examples are depicted schematically in FIG. 14A and FIG. 1413.

[0149] In some cases, the peptide linker comprises the amino acid sequence GCGGS (SEQ ID NO:318). In some cases, the peptide linker comprises the amino acid sequence GCGGS(GGGGS)n (SEQ ID NO:319), where 11 is an integer from 1 to 10. In some cases, the peptide linker comprises the amino acid sequence GCGGS(GGGGS)n (SEQ ID NO:398), where n is 1. In some cases, the peptide linker comprises the amino acid sequence GCGGS(GGGGS)n (SEQ ID NO:320), where n is 2. In some cases, the peptide linker comprises the amino acid sequence GCGGS(GGGGS)n (SEQ ID NO:321), where n is 3. In some cases, the peptide linker comprises the amino acid sequence GCGGS(GGGGS)n (SEQ ID NO:322), where n is 4. In some cases, the peptide linker comprises the amino acid sequence GCGGS(GGGGS)n (SEQ ID NO:323), where n is 5. In some cases, the peptide linker comprises the amino acid sequence GCGGS(GGGGS)n (SEQ ID NO:324), where n is 6. In some cases, the peptide linker comprises the amino acid sequence GCGGS(GGGGS)n (SEQ ID NO:325), where n is 7. In some cases, the peptide linker comprises the amino acid sequence GCGGS(GGGGS)n (SEQ ID NO:326), where n is 8. In some cases, the peptide linker comprises the amino acid sequence GCGGS(GGGGS)n (SEQ ID NO: 327), where n is 9. In some cases, the peptide linker comprises the amino acid sequence GCGGS(GGGGS)n (SEQ ID NO:328), where n is 10.

[0150] In some cases, the peptide linker comprises the amino acid sequence CGGGS (SEQ ID NO:329). In some cases, the peptide linker comprises the amino acid sequence CGGGS(GGGGS)n (SEQ ID NO: 330), where n is an integer from 1 to 10. In some cases, the peptide linker comprises the amino acid sequence CGGGS(GGGGS)n (SEQ ID NO:331), where n is 1. In some cases, the peptide linker comprises the amino acid sequence CGGGS(GGGGS)n (SEQ ID NO:332), where n is 2. In some cases, the peptide linker comprises the amino acid sequence CGGGS(GGGGS)n (SEQ 11) NO:333), where n is 3. In some cases, the peptide tinker comprises the amino acid sequence CGGGS(GGGGS)n (SEQ ID NO:334), where n is 4. In some cases, the peptide linker comprises the amino acid sequence CGGGS(GGGGS)n (SEQ ID NO:335), where n is 5. In some cases, the peptide linker comprises the amino acid sequence CGGGS(GGGGS)n (SEQ ID NO:336), where n is 6. In some cases, the peptide linker comprises the amino acid sequence CGGGS(GGGGS)n (SEQ ID NO:337), where n is 7. In some cases, the peptide linker comprises the amino acid sequence CGGGS(GGGGS)n (SEQ ID NO:338), where n is 8. In some cases, the peptide linker comprises the amino acid sequence CGGGS(GGGGS)n (SEQ ID NO:339), where n is 9. In some cases, the peptide linker comprises the amino acid sequence CGGGS(GGGGS)n (SEQ ID NO:340), where n is 10.

[0151] The following are non-limiting examples of MHC Class I heavy chain comprising a Y84C substitution and an A236C substitution, based on the amino acid numbering of HLA-A*0201 (depicted in FIG. 9A), or at corresponding positions in another Class I heavy chain allele.

### HLA-A

[0152] In some cases, a multiple disulfide-linked TMMP of the present disclosure (e.g., a double disulfide-linked TMMP) comprises: a) a first polypeptide comprising: i) an HPV peptide (e.g., an HPV peptide of from 4 amino acids to about 25 amino acids); and ii) a first MHC polypeptide, where the first polypeptide comprises a peptide linker between the HPV peptide and the first MHC polypeptide, where the peptide linker comprises a Cys residue, and where the first MHC polypeptide is a β2M polypeptide that comprises an amino acid substitution that introduces a Cys residue; and b) a second polypeptide comprising an HLA-A MHC Class I heavy chain comprising an amino acid sequence having at least 60%, at least 70%, at least 80%, at least 90%, at least 95%, at least 98%, at least 99%, or 100%, amino acid sequence identity to the following amino acid sequence: GSHSMRYFFTSVSKPGRGEPRFIAVGYVDDTQFVREDSDAASQRMEPRAPWIEQEGPEYWDGET RKVKAHSQTHRVDLGTLRGCYNQSEAGSHTVQRMYGCDVGSDWRFLRGYHQYAYDGKDYIA LKEDLIZSWTAADMAAQTTKHKVVEAAHVAEQLRAYLEGTCVEWERRYLENGKETLQRTDAPK THMTHHAVSDHEATLRCWALSFYPAEITLTWQRDGEDQTQDTELVETRPCGDGTFQKWAAVV VPSGQEQRYTCHVQHEGLPKPLTERWEP (SEQ ID NO:341), where amino acid 84 is a Cys and amino acid 236 is a Cys; and c) at least one immunomodulatory polypeptide, where the first and/or the second polypeptide comprises the at least one immunomodulatory polypeptide. In some cases, the peptide linker comprises the amino acid sequence GCGGS (SEQ ID NO:318). In some cases, the peptide linker comprises the amino acid sequence GCGGS(GGGGS)n (SEQ ID NO: 319), where n is an integer from 1 to 10. In some cases, the β2M polypeptide comprises an R12C substitution. For example, the β2M polypeptide can comprises an amino acid sequence having at least 90%, at least 95%, at least 98%, at least 99%, or 100%, amino acid sequence identity to the following amino acid sequence: IQRTPKIQVYSCHPAENGKSNFLNCYVSGFHPSDIEVDLLKNGERIEKVEHSDLSFSKDWSFYLL YYTEFTPTEKDEYACRVNHVTLSQPKIVKWDRDM (SEQ ID NO:314), where amino acid 12 is a Cys. The at least one immunomodulatory polypeptide can be a polypeptide that exerts an activating/stimulating effect on the target T cell or a suppressing/inhibitory effect on the target T cell. For example, the at least one immunomodulatory polypeptide can be a cytokine (e.g., an IL2 polypeptide, an IL7 polypeptide, an IL12 polypeptide, an IL15 polypeptide, an IL17 polypeptide, an IL21 polypeptide, an IL27 polypeptide, an IL-23 polypeptide, a TGFβ polypeptide, and the like; and including all family members, e.g., IL17A, IL-17B, IL-17C, IL-17D. IL-17E, IL-17F, IL-17E), a 4-1BBL polypeptide, an LCOS-L polypeptide, an OX-40L polypeptide, a CD80 polypeptide, a CD86 polypeptide, (CD80 and CD86 are also known as B7-1 and B7-2, respectively), a CD40 polypeptide, a CD70 polypeptide, a JAG1 (CD339) polypeptide, an ICAM (CD540 polypeptide, a PD-L1 polypeptide, a FasL polypeptide, a PD-L2 polypeptide, a PD-1H (VISTA) polypeptide, an ICOS-L (CD275) polypeptide, a GITRL polypeptide, an HVEM polypeptide, a CXCL10 polypeptide, a CXCL9 polypeptide, a CXCL11 polypeptide, a CXCL13 polypeptide, and a CX3CL1 polypeptide, a Galectin-9 polypeptide, a CD83 polypeptide, a CD30L polypeptide, a HLA-G polypeptide, a MICA polypeptide, a MICB polypeptide, a HVEM (CD270) polypeptide, a lymphotoxin beta receptor polypeptide, a 3/TR6 polypeptide, an ILT3 polypeptide, an ILT4 polypeptide, a CXCL10 polypeptide, a CXCL9 polypeptide, a CXCL11 polypeptide, a CXCL13 polypeptide, or a CX3CL1 polypeptide. These immunomodulatory polypeptides may be the wild type polypeptide or a variant of a wild type polypeptide. In some cases, the immunomodulatory polypeptide is an activating (“stimulatory”) immunomodulatory polypeptide; e.g., the immunomodulatory polypeptide may produce an activating/stimulating effect on a T cell. Examples of activating immunomodulatory polypeptides include, e.g., CD80, CD86, 4-1BBL, OX40L, CD70, ICOS-L. CD40, ICAM (CD54), IL2, IL7, IL12, IL15, IL17, IL21, IL27, IL23, GITRL, TGFβ, and lymphotoxin beta receptor. In some cases, the immunomodulatory polypeptide is an inhibitory (“suppressing”) immunomodulatory polypeptide; e.g., the immunomodulatory polypeptide s may produce a suppressing/inhibitory effect on a T cell. Examples of inhibitory immunomodulatory polypeptides include. e.g., PD-1H, PD-L1, PD-L2, TGFβ, FasL, HVEM, Galectin-9, ILT3, and ILT4. TGFβ polypeptides may produce either an activating/stimulating effect or a suppressing/inhibitory effect, depending on the context. In some cases, the at least one immunomodulatory polypeptide is a reduced affinity variant, as described elsewhere herein. In some cases, the first or the second polypeptide comprises an Ig Fc polypeptide.

[0153] In some cases, a multiple disulfide-linked TMMP of the present disclosure (e.g., a double disulfide-linked TMMP) comprises an HLA-A Class I heavy chain polypeptide. In some cases, the HLA-A heavy chain polypeptide present in a multiple disulfide-linked TMMP of the present disclosure (e.g., a double disulfide-linked TMMP) comprises an amino acid sequence having at least 95%, at least 98%, or at least 99%, amino acid sequence identity to the HLA-A*0101, HLA-A*0201, HLA-A*0202, HLA-A*1101, HLA-A*2301, HLA-A*2402, HLA-A*2407, HLA-A*3303, or HLA-A*3401 amino acid sequence depicted in FIG. 9A, where the HLA-A heavy chain polypeptide comprises Y84C and A236C substitutions.

### HLA-A*0101 (Y84C; 42360

[0154] hi some cases, the HLA-A heavy chain polypeptide present in a multiple disulfide-linked TMMP of the present disclosure (e.g., a double disulfide-linked TMMP) comprises an amino acid sequence having at least 95%, at least 98%, at least 99%, or 100%, amino acid sequence identity to the following HLA-A*0101 (Y84C; A236C) amino acid sequence:

[0155] GSHSMRYFFTSVSRPGRGEPRFIAVGYVDDTQFVRFDSDAASQKMEPRAPWIEQE GPEYWDQETRNMKAHSQTDRANLGTLRGCYNQSEDCiSHTIQIMYGCDVGPDGRFLRGYRQDA YDGKDYIALNEDLRSWTAADMAAQITKRKWEAVIIAAEQRRVYLEGRCVDGLRRYLENGKET LQRTDPPKTHMTHHPISDHEATLRCWALCiFYPAEITLTWQRDGEDQTQPTELVETRPCGDGTF QKWAAVVVPSGEEQRYTCHVQHEGLPKPLTERWE (SEQ ID NO:343), where amino acid 84 is a Cys anti amino acid 236 is a Cys.

### FHA-A*020.1 (Y84C; 42360

[0156] In some cases, the HLA-A heavy chain polypeptide present in a multiple disulfide-linked TMMP of the present disclosure (e.g., a double disulfide-linked TMMP) comprises an amino acid sequence having at least 95%, at least 98%, at least 99%, or 100%, amino acid sequence identity to the following HLA-A*0201 (Y84C; A236C) amino acid sequence: GSHSMRYFFTSVSRPGRGEPRHAVGYVDDTQFVRFDSDAASQRMEPRAPWIEQEGPEYWDGET RKVKAHSQTHRVDLGTLRGCYNQSEAGSHTVQRMYGCDVGSDWRFLRGYHQYAYIXIKDYIA LKEDLRSWTAADMAAQTTKHKWEAAHVAEQLRAYLEGTCVEWLRRYLENGKETLQRTDAPK THMTHHAVSDHEATLRCWALSFYPAEITLTWQRDGEDQTQDTELVETRPCGDGTFQKWAAVV VPSGQEQRYTCHVQHEGLPKPLTLRWEP (SEQ ID NO:341), where amino acid 84 is a Cys and amino acid 236 is a Cys.

### HLA-A*0202 (Y84C; A236C)

[0157] In some cases, the HLA-A heavy chain polypeptide present in a multiple disulfide-linked TMMP of the present disclosure (e.g., a double disulfide-linked TMMP) comprises an amino acid sequence having at least 95%, at least 98%, at least 99%, or 100%, amino acid sequence identity to the following HLA-A*0202 (Y84C; A236C) amino acid sequence: CiSHSMRYFFISVSRPGRGEPRHAVGYVDDTQFVRFDSDAASQRMEPRAPWIEQEGPEYWDGET RKVKAHSQTHRVDLGTLRGCYNQSEAGSHTVQRMYGCDVGSDWRFLRGYHQYAYDGKDYIA LKEDLRSWTAADMAAQTTKHKWEAAHVAEQLRAYLEGTCVEWLRRYLENGKETLQRTDAPK THMTHHAVSDHEATLRCWALSFYPAEITLTWQRDGEDQTQDTELVETRPCGDGTFQKWAAVV VPSGQEQRYTCHVQHEGLPKPLTLRWE (SEQ ID NO:341), where amino acid 84 is a Cys and amino acid 236 is a Cys.

### HLA-A*1101 (Y84C; A236C)

[0158] In some cases, the HLA-A heavy chain polypeptide present in a multiple disulfide-linked TMMP of the present disclosure (e.g., a double disulfide-linked TMMP) comprises an amino acid sequence having at least 95%, at least 98%, at least 99%, or 100%, amino acid sequence identity to the following HLA-A*1101 (Y84C; A236C) amino acid sequence: GSHSMRYFYTSVSRPGRGEPRFIAVGYVDDTQFVRFDSDAASQRMEPRAPWIEQEGPEYWDQE TRNVKAQSQTDRVDLGTLRGCYNQSEDGSITTIQIMYGCDVGPDGRFLRGYRQDAYDGKDYIA LNEDLRSWTAADMAAQITKRKWEAAHAAEQQRAYLEGRCVEWLRRYLENGKETLQRTDPPK THMTHHPISDHEATLRCWALGFYPAEITLTWQRDGEDQTQDTELVETRPCGDGTFQKWAAVV VPSGEEQRYTCHVQHEGLPKPLTLRWE (SEQ ID NO:344), where amino acid 84 is a Cys and amino acid 236 is a Cys.

### MA-A*2301 (Y84C; A236C)

[0159] In some cases, the HLA-A heavy chain polypeptide present in a multiple disulfide-linked TMMP of the present disclosure (e.g., a double disulfide-linked TMMP) comprises an amino acid sequence having at least 95%, at least 98%, at least 99%, or 100%, amino acid sequence identity to the following HLA-A*2301 (Y84C; A236C) amino acid sequence: GSHSMRYFSTSVSRPGRGEPRHAVGYVDDTQFVRFDSDAASQRMEPRAPWIEQEGPEYWDEET GKVKAHSQTDRENLRIALRCYNQSEAGSHTLQMMFGCDVGSDGRFLRGYHQYAYDGKDYIAL KEDLRSWTAADMAAQITQRKWEAARVAEQLRAYLEGTCVDGLRRYLENGKETLQRTDPPKTH MTHHPISDHEATLRCWALGFYPAEITLTWQRDGEDQTQDTELVETRPCGDGTFQKWAAVVVPS GEEQRYTCHVQHEGLPKPLTLRWE (SEQ ID NO:345), where amino acid 84 is a Cys and amino acid 236 is a Cys.

### HLA-A*2402 (Y84C; A236C)

[0160] In some cases, the HLA-A heavy chain polypeptide present in a multiple disulfide-linked TMMP of the present disclosure (e.g., a double disulfide-linked TMMP) comprises an amino acid sequence having at least 95%, at least 98%, at least 99%, or 100%, amino acid sequence identity to the following HLA-A*2402 (Y84C; A236C) amino acid sequence: GSHSMRYFSTSVSRPGRGEPRFIAVGYVDDTQFVRFDSDAASQRMEPRAPWIEQEGPEYWDEET GKVKAIISQTDRENLRIALRCYNQSEAGSTITLQMMFGCDVGSDGRFLRGYHQYAYDGKDYIAL KEDLRSWTAADMAAQffKRKWEAAHVAEQQRAYLEGTCVDGLRRYLENGKETLQRTDPPKT HMTHHPISDHEATLRCWALGFYPAEITLTWQRDGEDQTQDTELVETRPCGDGTFQKWAAVVV PSGEEQRYTCHVQHEGLPKPLTLRWE (SEQ ID NO:346), where amino acid 84 is a Cys and amino acid 236 is a Cys.

### HLA-A*2407 (Y84C; A236C)

[0161] In some cases, the HLA-A heavy chain polypeptide present in a multiple disulfide-linked TMMP of the present disclosure (e.g., a double disulfide-linked TMMP) comprises an amino acid sequence having at least 95%, at least 98%, at least 99%, or 100%, amino acid sequence identity to the following HLA-A*2407 (Y84C; A236C) amino acid sequence: GSHSMRYFSTSVSRPGRGEPRFIAVGYVDDTQFVRFDSDAASQRMEPRAPWIEQEGPEYWDEET GKVKAQSQTDRENLRIALRCYNQSEAGSHTLQMMFGCDVGSDGRFLRGYHQYAYDGKDYIAL KEDLRSWTAADMAAQITKRKWEAAHVAEQQRAYLEGTCVDGLRRYLENGKEILQRTDPPKT HMTHHPISDHEATLRCWALGFYPAEITLTWQRDGEDQTQDTELVETRPCGDGTFQKWAAVVV PSGEEQRYTCHVQHEGLPKPLTLRWE (SEQ ID NO:347), where amino acid 84 is a Cys and amino acid 236 is a Cys.

### HLA-A*3303 (Y84C; A236C)

[0162] In some cases, the HLA-A heavy chain polypeptide present in a multiple disulfide-linked TMMP of the present disclosure (e.g., a double disulfide-linked TMMP) comprises an amino acid sequence having at least 95%, at least 98%, at least 99%, or 100%, amino acid sequence identity to the following HLA-A*3303 (Y84C; A236C) amino acid sequence:

[0163] GSHSMRYFTTSVSRPGRGEPRFIAVGYVDDTQFVRFDSDAASQRMEPRAPWIEQE GPEYWDRNTRNVKAHSQIDRVDLCITLRGCYNQSEAGSHTIQMMYGCDVGSDGRFLRGYQQD AYDGKDYIALNEDLRSWTAADMAAQITQRKWEAARVAEQLRAYLEGTCVEWLRRYLENGKE TLQRTDPPKTHMTHHAVSDFIEATLRCWALSFYPAEITLTWQRDGEDQTQDTELVETRPCGDGT FQKWASVVVPSGQEQRYTCHVQHEGLPKPLTLRWE (SEQ ID NO:348), where amino acid 84 is a Cys and amino acid 236 is a Cys.

### HLA-A*3401 (Y84C; A236C)

[0164] In some cases, the HLA-A heavy chain polypeptide present in a multiple disulfide-linked TMMP of the present disclosure (e.g., a double disulfide-linked TMMP) comprises an amino acid sequence having at least 95%, at least 98%, at least 99%, or 100%, amino acid sequence identity to the following HLA-A*3401 (Y84C; A236C) amino acid sequence: GSIISMRYFYTSVSRPGRGEPRFIAVGYVDDTQFVRFDSDAASQRMEPRAPWIEQEGPEYWDRN TRKVKAQSQTDRVDLGTLRGCYNQSEDGSHTIQRMYGCDVOPDGRFLRGYQQDAYDGKDYIA LNEDLRSWTAADMAAQITQRKWETAHEAEQWRAYLEGTCVEWLRRYLENGKETLQRTDAPK THMTHHAVSDHEATLACWALSFYPAEITLTWQRDGEDQTQDTELVETRPCGDGTFQKWASVV VPSGQEQRYTCHVQHEGLPKPLTLRWE (SEQ ID NO:349), where amino acid 84 is a Cys and amino acid 236 is a Cys.

### HLA-B

[0165] In some cases, a multiple disulfide-linked TMMP of the present disclosure (e.g., a double disulfide-linked TMMP) comprises: a) a first polypeptide comprising: i) an HPV peptide (e.g., an HPV peptide of from 4 amino acids to about 25 amino acids); and ii) a first MHC polypeptide, where the first polypeptide comprises a peptide linker between the HPV peptide and the first MHC polypeptide, where the peptide linker comprises a Cys residue, and where the first MHC polypeptide is a β2M polypeptide that comprises an amino acid substitution that introduces a Cys residue; and b) a second polypeptide comprising an HLA-B MHC Class I heavy chain comprising an amino acid sequence having at least 60%, at least 70%, at least 80%, at least 90%, at least 95%, at least 98%, at least 99%, or 100%, amino acid sequence identity to the following amino acid sequence: GSFISMRYFYTSVSRPGRGEPRFISVGYVDDTQFVREDSDAASPREEPRAPWIEQEGPEYWDRNT QIYKAQAQTDRESLRNLRGCYNQSEAGSHTLQSMYGCDVGPDGRLLRGHDQYAYDGKDYIAL NEDLRSWTAADTAAQITQRKWEAAREAEQRRAYLEGECVEWLRRYLENGKDKLERADPPKTH VTHHPISDHEATLRCWALGEYPAEITLTTWQRDGEDQTQDTELVETRPCGDRTFQKWAAVVVPS GEEQRYTCHVQHEGLPKPLTLRWEP (SEQ ID NO:350), where amino acid 84 is a Cys and amino acid 236 is a Cys; and c) at least one immunomodulatory polypeptide, where the first and/or the second polypeptide comprises the at least one immunomodulatory polypeptide. In some cases, the peptide linker comprises the amino acid sequence GUMS (SEQ ID NO:318). In some cases, the peptide linker comprises the amino acid sequence GCGGS(GGGGS)n (SEQ ID NO:342), where n is an integer from 1 to 10. In some cases, the 112M polypeptide comprises an R12C substitution. For example, the β2M polypeptide can comprises an amino acid sequence having at least 90%, at least 95%, at least 98%, at least 99%, or 100%, amino acid sequence identity to the following amino acid sequence: IQRTPKIQVYSCHPAENGKSNELNCYVSGFHPSDIEVDLLKNGERIEKVEHSDLSFSKDWSFYLL YYTEFTPTEKDEYACRVNHVILSQPKIVKWDRDM (SEQ ID NO:314), where amino acid 12 is a Cys. The at least one immunomodulatory polypeptide can be a polypeptide that exerts an activating/stimulating effect on the target T cell or a suppressing/inhibitory effect on the target T cell. For example, the at least one immunomodulatory polypeptide can be a cytokine (e.g., an IL2 polypeptide, an IL7 polypeptide, an IL12 polypeptide, an IL15 polypeptide, an IL17 polypeptide, an IL21 polypeptide, an IL27 polypeptide, an IL-23 polypeptide, a TGFβ polypeptide, and the like; and including all family members, e.g., IL17A, IL-17B, IL-17C, IL-17D, IL-17E, IL-17F, IL-17E), a 4-1 BBL polypeptide, an ICOS-L polypeptide, an OX-40L polypeptide, a CD80 polypeptide, a CD86 polypeptide, (CD80 and CD86 are also known as B7-1 and B7-2, respectively), a CD40 polypeptide, a CD70 polypeptide, a JAG1 (CD339) polypeptide, an ICAM (CD540 polypeptide, a PD-L1 polypeptide, a FasL polypeptide, a PD-L2 polypeptide, a PD-1H (VISTA) polypeptide, an ICOS-L (CD275) polypeptide, a GITRL polypeptide, an HVEM polypeptide, a CXCL10 polypeptide, a CXCL9 polypeptide, a CXCL11 polypeptide, a CXCL13 polypeptide, and a CX3CL1 polypeptide, a Galectin-9 polypeptide, a CD83 polypeptide, a CD30L polypeptide, a HLA-G polypeptide, a MICA polypeptide, a MICB polypeptide, a HVEM (CD270) polypeptide, a lymphotoxin beta receptor polypeptide, a 3/TR6 polypeptide, an ILT3 polypeptide, an ILT4 polypeptide, a CXCL10 polypeptide, a CXCL9 polypeptide, a CXCL11 polypeptide, a CXCL13 polypeptide, or a CX3CL1 polypeptide. These immunomodulatory polypeptides may be the wild type polypeptide or a variant of a wild type polypeptide. In some cases, the immunomodulatory polypeptide is an activating (“stimulatory”) immunomodulatory polypeptide; e.g., the immunomodulatory polypeptide may produce an activating/stimulating effect on a T cell. Examples of activating immunomodulatory polypeptides include, e.g., CD80, CD86, 4-1BBL, OX40L, CD70, ICOS-L, CD40, ICAM (CD54), IL2, IL7, IL12, IL15, IL17, IL21, IL27, IL23, GITRL, TGFβ, and lymphotoxin beta receptor. In some cases, the immunomodulatory polypeptide is an inhibitory (“suppressing”) immunomodulatory polypeptide; e.g., the immunomodulatory polypeptide s may produce a suppressing/inhibitory effect on a T cell. Examples of inhibitory immunomodulatory polypeptides include, e.g., PD-1H, PD-L1, PD-L2, TGFβ, FasL, HVEM, Galectin-9, ILT3, and ILT4. TGFβ polypeptides may produce either an activating/stimulating effect or a suppressing/inhibitory effect, depending on the context. In some cases, the at least one immunomodulatory polypeptide is a reduced affinity variant, as described elsewhere herein. In some cases, the first or the second polypeptide comprises an Ig Fc polypeptide.

[0166] In some cases, a multiple disulfide-linked TMMP of the present disclosure comprises an HLA-B Class I heavy chain polypeptide. In some cases, the HLA-B heavy chain polypeptide present in a multiple disulfide-linked TMMP of the present disclosure (e.g., a double disulfide-linked TMMP) comprises an amino acid sequence having at least 95%, at least 98%, or at least 99%, amino acid sequence identity to the HLA-B*0702, HLA-B*0801, HLA-B*1502, HLA-B*3802, HLA-B*4001, HLA-B*4601, or HLA-B*530I amino acid sequence depicted in FIG. 10A, where the HLA-B heavy chain polypeptide comprises Y84C and A236C substitutions.

### HLA-B*0702 (Y84C; A236C)

[0167] In some cases, the HLA-B heavy chain polypeptide present in a multiple disulfide-linked TMMP of the present disclosure (e.g., a double disulfide-linked TMMP) comprises an amino acid sequence having at least 95%, at least 98%, at least 99%, or 100%, amino acid sequence identity to the following HLA-B*0702 (Y84C; A236C) amino acid sequence:

[0168] GSHSMRYFYTSVSRPGRGEPREISVGYVDDTQFVREDSDAASPREEPRAPWIEQE GPEYWDRNTQIYKAQAQTDRESLRNLRGCYNQSEAGSHTLQSMYGCDVGPDGRLLRGHDQYA YDGKDYIALNEDLRSWTAADTAAQITQRKWEAAREAEQRRAYLEGECVEWIARYLENGKDKL ERADPPKTHVTHHPISDHEATLRCWALGFYPAEITLTWQRDGEDQTQDTELVETRPCGDRTFQK WAAVVVPSGEEQRYTCHVQHEGLPKPLTLRWE (SEQ ID NO:350), where amino acid 84 is a Cys and amino acid 236 is a Cys.

### HLA-B*0801 (Y84C; A236C)

[0169] In some cases, the HLA-B heavy chain polypeptide present in a multiple disulfide-linked TMMP of the present disclosure (e.g., a double disulfide-linked TMMP) comprises an amino acid sequence having at least 95%, at least 98%, at least 99%, or 100%, amino acid sequence identity to the following HLA-B*0801 (Y84C; A236C) amino acid sequence:

[0170] GSHSMRYFDTAMSRPGRGEPRFISVGYVDDTQFVREDSDAASPREEPRAPWIEQE GPEYWDRNTQIEKTNTQTDRESLRNLRGCYNQSEAGSHTLQSMYGCDVGPDGRLLRGHNQYA YDGKDYIALNEDLRSWTAADTAAQITQRKWEAARVAEQDRAYLEGTCVEWLRRYLENGKDTL ERADPPKTHVTIIHRISDHEATLRCWALGFYPAEITLTWQRDGEDQTQDTELVETRPCGDRTFQK WAAVVVPSGEEQRYTCIIVQIIEGLPKPLTLRWE (SEQ ID NO:351), where amino acid 84 is a Cys and amino acid 236 is a Cys.

### HLA-B*1502 (Y84C; A236C)

[0171] In some cases, the HLA-B heavy chain polypeptide present in a multiple disulfide-linked TMMP of the present disclosure (e.g., a double disulfide-linked TMMP) comprises an amino acid sequence having at least 95%, at least 98%, at least 99%, or 100%, amino acid sequence identity to the following HLA-B*1502 (Y84C; A236C) amino acid sequence:

[0172] GSHSMRYFYTAMSRPGRGEPRFIAVGYVDDTQFVRFDSDAASPRMAPRAPWIEQ EGPEYWDRNTQJSKTNTQTYRESLRNLIWCYNQSEAGSHIIQRMYGCDVGPDGRLLRGYDQSA YDGKDYIALNEDLSSWTAADTAAQITQRKWEAAREAEQLRAYLEGLCVEWLRRYLENGKETL QRADPPKTHVTHHPISDHEATLRCWALGFYPAEITLTWQRDGEDQTQDTELVETRPCGDRTFQ KWAAVVVPSGEEQRYTCHVQIIEGLPKPLTLRWE (SEQ ID NO:352), where amino acid 84 is a Cys and amino acid 236 is a Cys.

### HLA-B*3802 (Y84C; A236C)

[0173] In some cases, the HLA-B heavy chain polypeptide present in a multiple disulfide-linked TMMP of the present disclosure (e.g., a double disulfide-linked TMMP) comprises an amino acid sequence having at least 95%, at least 98%, at least 99%, or 100%, amino acid sequence identity to the following HLA-B*3802 (Y84C; A236C) amino acid sequence:

[0174] GSHSMRYFYTSVSRPCIRGEPRFISVGYVDDTQFVREDSDAASPREEPRAPWIEQE GPEYWDRNTQICKTNTQTYRENLRTALRCYNQSEAGSFITLQRMYGCDVGPDGRLLRGIINQFA YDGKDYIALNEDLSSWTAADTAAQITQRKWEAARVAEQLRTYLEGTCVEWLRRYLENGKETL QRADPPKTIWTHIWISDHEATLRCWALGFYPAEITLTWQRDGEDQTQDTELVETRPCGDRTFQ KWAAVVVPSGEEQRYTCHVQHEGLPKPLTLRWE (SEQ ID NO:353), where amino acid 84 is a Cys and amino acid 236 is a Cys.

### HLA-B*400.1 (Y84C; A2346C)

[0175] In some cases, the HLA-B heavy chain polypeptide present in a multiple disulfide-linked TMMP of the present disclosure (e.g., a double disulfide-linked TMMP) comprises an amino acid sequence having at least 95%, at least 98%, at least 99%, or 100%, amino acid sequence identity to the following HLA-B*400I (Y84C; A236C) amino acid sequence:

[0176] GSHSMRYFHTAMSRPGRGEPRFITVGYVDDTLFVRFDSDATSPRKEPRAPWIEQE GPEYWDRETQISKTNTQTYRESERNLRGCYNQSEAGSHTLQRMYGCDVGPDGRLLRGLINQYA YDGKDYIALNEDLRSWTAADTAAQISQRKLEAARVAEQLRAYLEGECVEWLRRYLENGKDKL ERADPPKTHVTHHPISDHEATLRCWALGFYPAEITLTWQRDGEDQTQDTELVETRPCGDRTFQK WAAVVVPSGEEQRYTCHVQHEGLPKPLTLRWE (SEQ ID NO:354) where amino acid 84 is a Cys and amino acid 236 is a Cys.

### HLA-B*4601 (Y84C; A236C)

[0177] In some cases, the HLA-B heavy chain polypeptide present in a multiple disulfide-linked TMMP of the present disclosure (e.g., a double disulfide-linked TMMP) comprises an amino acid sequence having at least 95%, at least 98%, at least 99%, or 100%, amino acid sequence identity to the following HLA-B*4601 (Y84C; A236C) amino acid sequence:

[0178] GSHSMRYFYTAMSRPGRGEPRFIAVGYVDDTQFVREDSDAASPRMAPRAPWIEQ EGPEYWDRETQKYKRQAQTDRVSLRNLROCYNQSEAGSHTLQRMYGCDVGPDGRLLRGHDQ SAYDCKDYIALNEDLSSWTAADTAAQITQRKWEAAREAEQWRAYLEGLCVEWLRRYLENGKE TLQRADPPKTHVTHHPISDHEATLRCWALGFYPAEITLTWQRDGEDQTQDTELVETRPCGDRTF QKWAAVVVPSGEEQRYTCHVQHEGLPKPLTLRWE (SEQ ID NO:355) where amino acid 84 is a Cys and amino acid 236 is a Cys.

### HLA-B*5301 (Y84C; 4236C)

[0179] In some cases, the HLA-B heavy chain polypeptide present in a multiple disulfide-linked TMMP of the present disclosure (e.g., a double disulfide-linked TMMP) comprises an amino acid sequence having at least 95%, at least 98%, at least 99%, or 100%, amino acid sequence identity to the following HLA-B*5301 (Y84C; A236C) amino acid sequence:

[0180] GSLISMRYFYTAMSRPGRGEPRHAVGYVDDTQFVREDSDAASPRTEPRAPWIEQE GPEYWDRNTQIEKTNTQTYRENLRIALRCYNQSEAGSHIIQRMYGCDLGPDGRLLRGHDQSAY DGKDYIALNEDLSSWTAADTAAQITQRKWEAARVAEQLRAYLEGLCVEWLRRYLENGKETLQ RADPPKTHVTHHPVSDHEATLRCWALGFYPAEITLTWQRDGEDQTQDTELVETRPCGDRTFQK WAAVVVPSGEEQRYTCHVQIIEGLPKPLTLRWE (SEQ ID NO:356) where amino acid 84 is a Cys and amino acid 236 is a Cys.

### HLA-C

[0181] In some cases, a multiple disulfide-linked TMMP of the present disclosure (e.g., a double disulfide-linked TMMP) comprises: a) a first polypeptide comprising: i) an HPV peptide (e.g., an HPV peptide of from 4 amino acids to about 25 amino acids); and ii) a first MHC polypeptide, where the first polypeptide comprises a peptide linker between the HPV peptide and the first MHC polypeptide, where the peptide linker comprises a Cys residue, and where the first WIC polypeptide is a β2M polypeptide that comprises an amino acid substitution that introduces a Cys residue; and h) a second polypeptide comprising an HLA-C MHC Class I heavy chain comprising an amino acid sequence having at least 60%, at least 70%, at least 80%, at least 90%, at least 95%, at least 98%, at least 99%, or 100%, amino acid sequence identity to the following amino acid sequence: CSHSMRYFDTAVSRPGRGEPRFISVGYVDDTQFVRFDSDAASPRGEPRAPWVEQEGPEYWDRE TQNYKRQAQADRVSLRNLRGCYNQSEDOSHTLQRMYGCDLGPDGRLLRGYDQSAYDGKDYI ALNEDLRSWTAADTAAQITQRKLEAARAAEQLRAYLEGTCVEWLRRYLENGKETLQRAEPPKT HVTHHPLSDHEATLRCWALGFYPAEITLTWQRDGEDQTQDTELVETRPCGDGTFQKWAAVVV PSGQEQRVICHMQHEGLQEPLILSWEP (SEQ ID NO:357), where amino acid 84 is a Cys and amino acid 236 is a Cys; and c) at least one immunomodulatory polypeptide, where the first and/or the second polypeptide comprises the at least one immunomodulatory polypeptide. In some cases, the peptide linker comprises the amino acid sequence GCGGS (SEQ ID NO:318). In some cases, the peptide linker comprises the amino acid sequence GCGGS(OGGGS)n (SEQ ID NO:342), where n is an integer from 1 to 10. In some cases, the (12M polypeptide comprises an R12C substitution. For example, the β2M polypeptide can comprises an amino acid sequence having at least 90%, at least 95%, at least 98%, at least 99%, or 100%, amino acid sequence identity to the following amino acid sequence: IQRTPKIQVYSCHPAENGKSNFLNCYVSGFHPSDIEVDLLKNGERIEK.VEHSDLSFSKDWSFYLL YYTEFTPTEKDEYACRVNFIVTLSQPKIVKWDRDM (SEQ ID NO:314), where amino acid 12 is a Cys. The at least one immunomodulatory polypeptide can be a polypeptide that exerts an activating/stimulating effect on the target T cell or a suppressing/inhibitory effect on the target T cell. For example, the at least one immunomodulatory polypeptide can be a cytokine (e.g., an IL2 polypeptide, an IL7 polypeptide, an IL12 polypeptide, an IL15 polypeptide, an IL17 polypeptide, an IL21 polypeptide, an IL27 polypeptide, an IL-23 polypeptide, a TGFβ polypeptide, and the like; and including all family members, e.g., IL17A, IL-17B, IL-17C, IL-17D, IL-17E, IL-17F, IL-17E), a 4-1BBL polypeptide, an ICOS-L polypeptide, an OX-40L polypeptide, a CD80 polypeptide, a CD86 polypeptide, (CD80 and CD86 are also known as B7-1 and B7-2, respectively), a CD40 polypeptide, a CD70 polypeptide, a JAG1 (CD339) polypeptide, an ICAM (CD540 polypeptide, a PD-L1 polypeptide, a FasL polypeptide, a PD-L2 polypeptide, a PD-1H (VISTA) polypeptide, an ICOS-L (CD275) polypeptide, a GITRL polypeptide, an HVEM polypeptide, a CXCL10 polypeptide, a CXCL9 polypeptide, a CXCL11 polypeptide, a CXCL13 polypeptide, and a CX3CL1 polypeptide, a Galectin-9 polypeptide, a CD83 polypeptide, a CD30L polypeptide, a HLA-G polypeptide, a MICA polypeptide, a MICB polypeptide, a HVEM (CD270) polypeptide, a lymphotoxin beta receptor polypeptide, a 3/TR6 polypeptide, an ILT3 polypeptide, an ILT4 polypeptide, a CXCL10 polypeptide, a CXCL9 polypeptide, a CXCL11 polypeptide, a CXCL13 polypeptide, or a CX3CL1 polypeptide. These immunomodulatory polypeptides may be the wild type polypeptide or a variant of a wild type polypeptide. In some cases, the immunomodulatory polypeptide is an activating (“stimulatory”) immunomodulatory polypeptide; e.g., the immunomodulatory polypeptide may produce an activating/stimulating effect on a T cell. Examples of activating immunomodulatory polypeptides include, e.g., CD80, CD86, 4-1BBL, OX40L, CD70, ICOS-L, CD40, ICAM (CD54), IL2, IL7, IL12, IL15, IL17, IL21, IL27, IL23, GITRL, TGFβ, and lymphotoxin beta receptor. In some cases, the immunomodulatory polypeptide is an inhibitory (“suppressing”) immunomodulatory polypeptide; e.g., the immunomodulatory polypeptide s may produce a suppressing/inhibitory effect on a T cell. Examples of inhibitory immunomodulatory polypeptides include, e.g., PD-1H, PD-L1 PD-L2, TGFβ, FasL, HVEM, Galectin-9, ILT3, and ILT4. TGFβ polypeptides may produce either an activating/stimulating effect or a suppressing/inhibitory effect, depending on the context. In some cases, the at least one immunomodulatory polypeptide is a reduced affinity variant, as described elsewhere herein. In some cases, the first or the second polypeptide comprises an Ig Fc polypeptide.

[0182] In some cases, a multiple disulfide-linked TMMP of the present disclosure (e.g., a double disulfide-linked TMMP) comprises an HLA-C Class I heavy chain polypeptide. In some cases, the HLA-C heavy chain polypeptide present in a multiple disulfide-linked TMMP of the present disclosure (e.g., a double disulfide-linked TMMP) comprises an amino acid sequence having at least 95%, at least 98%, or at least 99%, amino acid sequence identity to the HLA-C*0102, HLA-C*0303. HLA-C*0304, HLA-C*0401, HLA-C*0602, HLA-C*0701, HLA-C*0702, HLA-C*0801, or HLA-C*1502 amino acid sequence depicted in FIG. 11A, where the HLA-C heavy chain polypeptide comprises Y84C and A236C substitutions.

### HLA-C*01:02 (Y84C; A236C)

[0183] In some cases, the HLA-C heavy chain polypeptide present in a multiple disulfide-linked TMMP of the present disclosure (e.g., a double disulfide-linked TMMP) comprises an amino acid sequence having at least 95%, at least 98%, at least 99%, or 100%, amino acid sequence identity to the following HLA-C*01:02 (Y84C; A236C) amino acid sequence:

[0184] CSHSMKYITTSVSRPGRGEPREISVGYVDDTQFVREDSDAASPRGEPRAPWVEQE GPEYWDRETQKYKRQAQTDRVSLRNLRGCYNQSEAGSHTLQWMCGCDLGPDGRLLRGYDQY AYDGKDYIALNEDLRSWTAADTAAQITQRKWEAAREAEQRRAYLEGTCVEWLRRYLENGKET LQRAEHPKTHVTHHPVSDHEATLRCWALGFYPAEITLTWQWDGEDQTQDTELVETRPCGDGTE QKWAAVMVPSGEEQRYTCHVQHEGLPEPLTLRWEP (SEQ ID NO:358), where amino acid 84 is a Cys and amino acid 236 is a Cys.

### HLA-C*0303 (Y84C; A236C)

[0185] In some cases, the HLA-C heavy chain polypeptide present in a multiple disulfide-linked TMMP of the present disclosure (e.g., a double disulfide-linked TMMP) comprises an amino acid sequence having at least 95%, at least 98%, at least 99%, or 100%, amino acid sequence identity to the following HLA-C*03:03 (Y84C; A236C) amino acid sequence:

[0186] GSHSMRYFYTAVSRPGRGEPHFIAVGYVDDTQFVREDSDAASPRGEPRAPWVEQ EGPEYWDRETQKYKRQAQTDRVSLRNLRGCYNQSEARSHIIQRMYGCDVGPDGRLLRGIDQY AYDGKDYIALNEDLRSWTAADTAAQITQRKWEAAREAEQLRAYLEGLCVEWLRRYLKNGKET LQRAEHPKTHVTHHPVSDHEATLRCWALGFYPAEITLTWQWDGEDQTQDTELVETRPCGDGTF QKWAAVVVPSCEEQRYTCHVQIIEGLPEPLTLRWEP (SEQ ID NO:359), where amino acid 84 is a Cys and amino acid 236 is a Cys.

### HLA-C*0304 (Y84C; A236C)

[0187] In some cases, the HLA-C heavy chain polypeptide present in a multiple disulfide-linked TMMP of the present disclosure (e.g., a double disulfide-linked TMMP) comprises an amino acid sequence having at least 95%, at least 98%, at least 99%, or 100%, amino acid sequence identity to the following HLA-C*03:04 (Y84C; A236C) amino acid sequence:

[0188] GSHSMRYFYTAVSRPGRGEPHEEAVGYVDDTQFVREDSDAASPRGEPRAPWVEQ EGPEYWDRETQKYKRQAQTDRVSLRNLRGCYNQSEAGSHIIQRMYGCDVGPDGRLLRGYDQY AYDGKDYIALNEDLRSWTAADTAAQITQRKWEAAREAEQLRAYLEGLCVE,WLRRYLKNGKET LQRAEHPKTHVTHHPVSDHEATLRCWALGFYPAEITLTWQWDGEDQTQDTELVETRPCGDGTF QKWAAVVVPSGEEQRYTCHNIQUIEGLPEPLTLRWEP (SEQ ID NO:360), where amino acid 84 is a Cys and amino acid 236 is a Cys.

### HLA-C*0401 (Y84C; A236C)

[0189] In some cases, the HLA-C heavy chain polypeptide present in a multiple disulfide-linked TMMP of the present disclosure (e.g., a double disulfide-linked TMMP) comprises an amino acid sequence having at least 95%, at least 98%, at least 99%, or 100%, amino acid sequence identity to the following HLA-C*04:01 (Y84C; A236C) amino acid sequence:

[0190] GSHSMRYFSTSVSWPGRGEPRHAVGYVDDTQFVREDSDAASPRGEPREPWVEQ EGPEYWDRETQKYKRQAQADRVNLRKLRGCYNQSEDGSHTLQRMFGCDLGPDGRLLRGYNQ FAYDGKDYIALNEDLRSWTAADTAAQITQRKWEAAREAEQRRAYLEGTCVEWLRRYLENGKE TLQRAEIIPKTHVTHHPVSDHEATLRCWALGFYPAEITLTWQWDGEDQTQDTELVETRPCGDGT FQKWAAVVVPSGEEQRYTCHVQHEGLPEPLTLRWKP (SEQ ID NO:361), where amino acid 84 is a Cys and amino acid 236 is a Cys.

### HLA-C*0602 (Y84C; A236C)

[0191] In some cases, the HLA-C heavy chain polypeptide present in a multiple disulfide-linked TMMP of the present disclosure (e.g., a double disulfide-linked TMMP) comprises an amino acid sequence having at least 95%, at least 98%, at least 99%, or 100%, amino acid sequence identity to the following HLA-C*06:02 (Y84C; A236C) amino acid sequence:

[0192] CSHSMRYFDTAVSRPGRGEPRFISVGYVDDTQFVRFDSDAASPRGEPRAPWVEQ EGPEYWDRETQKYKRQAQADRVNLRKLRGCYNQSEDGSIITLQWMYGCDLGPDGRLIAGYD QSAYDGKDYIALNEDLRSWTAADTAAQITQRKWEAAREAEQWRAYLEGTCVEWLRRYLENG KETLQRAEHPKTHVTHHPVSDFIEATLRCWALGFYPAEITLTWQRDGEDQTQDELVETRPCGD GTFQKWAAVVVPSGEEQRYTCHVQHEGLPEPLTLRWEP (SEQ ID NO:362), where amino acid 84 is a Cys and amino acid 236 is a Cys.

### HLA-C*0701 (Y84C; A236C)

[0193] In some cases, the HLA-C heavy chain polypeptide present in a multiple disulfide-linked TMMP of the present disclosure (e.g., a double disulfide-linked TMMP) comprises an amino acid sequence having at least 95%, at least 98%, at least 99%, or 100%, amino acid sequence identity to the following HLA-C*07:01 (Y84C; A236C) amino acid sequence:

[0194] CSIISMRYFDTAVSRPGRGEPRFISVGYVDDTQFVREDSDAASPRGEPRAPWVEQ EGPEYWDRETQNYKRQAQADRVSLRNLRGCYNQSEDGSHTLQRMYGCDLGPDGRELRGYDQ SAYDGKDYIALNEDLRSWTAADTAAQITQRKLEAARAAEQLRAYLEGTCVEWLRRYLENGKE TLQRAEPPKTHVTHHPLSDHEATLRCWALGFYPAEITLTWQRDGEDQTQDTELVETRPCGDGT FQKWAAVVVPSGQEQRYTCHMQHEGLQEPLTLSWEP (SEQ ID NO:357), where amino acid 84 is a Cys and amino acid 236 is a Cys.

### HM-C*0702 (Y84C; A236C)

[0195] In some cases, the HLA-C heavy chain polypeptide present in a multiple disulfide-linked TMMP of the present disclosure (e.g., a double disulfide-linked TMMP) comprises an amino acid sequence having at least 95%, at least 98%, at least 99%, or 100%, amino acid sequence identity to the following HLA-C*07:02 (Y84C; A236C) amino acid sequence:

[0196] CSIISMRYFDTAVSRPGRGEPRFISVGYVDDTQFVREDSDAASPRGEPRAPWVEQ EGPEYWDRETQKYKRQAQADRVSLRNLRGCYNQSEDGSHTLQRMSGCDLGPDGRLLRGYDQS AYDGKDYIALNEDERSWTAADTAAQITQRKLEAARAAEQLRAYLEGTCVEWLRRYLENGKET LQRAEPPKTHVTHHPLSDHEATLRCWALGFYPAEITLTWQRDGEDQTQDTELVETRPCGDGTE QKWAAVVVPSGQEQRYTCHMQHEGLQEPLTSWEP (SEQ ID NO:404), where amino acid 84 is a Cys and amino acid 236 is a Cys.

### HLA-C*0801 (Y84C; A236C)

[0197] In some cases, the HLA-C heavy chain polypeptide present in a multiple disulfide-linked TMMP of the present disclosure (e.g., a double disulfide-linked TMMP) comprises an amino acid sequence having at least 95%, at least 98%, at least 99%, or 100%, amino acid sequence identity to the following HLA-C*08:01 (Y84C; A236C) amino acid sequence:

[0198] CSHSMRYFYTAVSRPGRGEPRHAVGYVDDTQFVQEDSDAASPRGEPRAPWVEQ EGPEYWDRETQKYKRQAQTDRVSLRNLRGCYNQSEAGSHTLQRMYGCDLGPDGRLLRGYNQ FAYDGKDYIALNEDLRSWTAADTAAQITQRKWEAARTAEQLRAYLEGTCVEWLRRYLENGKK TLQRAEHPKTHVTHHPVSDHEATLRCWALGFYPAEITLTWQRDGEDQTQDTELVETRPCGDGT FQKWAAVVVPSGEEQRYTCHVQHEGLPEPLTLRWCIP (SEQ ID NO:363), where amino acid 84 is a Cys and amino acid 236 is a Cys.

### HLA-C*1502 (Y84C; A2360

[0199] In some cases, the HLA-C heavy chain polypeptide present in a multiple disulfide-linked TMMP of the present disclosure (e.g., a double disulfide-linked TMMP) comprises an amino acid sequence having at least 95%, at least 98%, at least 99%, or 100%, amino acid sequence identity to the following HLA-C*15:02 (Y84C; A236C) amino acid sequence:

[0200] CSHSMRYFYTAVSRPGRGEPHFIAVGYVDDTQFVREDSDAASPRGEPRAPWVEQ EGPEYWDRETQNYKRQAQTDRVNLRKLRGCYNQSEAGSHIIQRMYGCDLGPDGRLLRGHDQL AYDGKDYIALNEDLRSWTAADTAAQITQRKWEAAREAEQLRAYLEGTCVEWLRRYLENGKET LQRAEHPKTHVTHHPVSDHEATLRCWALGFYPAEITLTWQRDGEDQTQDTELVETRPCGDGTF QKWAAVVVPSGEEQRYTCHVQHEGLPEPLTERWEP (SEQ ID NO:364), where amino acid 84 is a Cys and amino acid 236 is a Cys.

### Scaffold Polypeptides

[0201] A TMMP can comprise an Fe polypeptide, or can comprise another suitable scaffold polypeptide.

[0202] Suitable scaffold polypeptides include antibody-based scaffold polypeptides and non-antibody-based scaffolds. Non-antibody-based scaffolds include, e.g., albumin, an XTEN (extended recombinant) polypeptide, transferrin, an Fe receptor polypeptide, an elastin-like polypeptide (see, e.g., Hassounch et al. (2012) Methods Enzymol. 502:215; e.g., a polypeptide comprising a pentapeptide repeat unit of (Val-Pro-Gly-X-Gly; SEQ ID NO:59), where X is any amino acid other than proline), an albumin-binding polypeptide, a silk-like polypeptide (see, e.g., Valluzzi et al. (2002) Philos Trans R Soc Land B Biol Sci. 357:165), a silk-elastin-like polypeptide (SELP; see, e.g., Megeed et al. (2002) Adv Drug Deliv Rev. 54:1075), and the like. Suitable XTEN polypeptides include, e.g., those disclosed in WO 2009/023270, WO 2010/091122, WO 2007/103515, US 2010/0189682, and US 2009/0092582; see also Schellenberger et al. (2009) Nat Biotechnol. 27:1186). Suitable albumin polypeptides include, e.g., human serum albumin.

[0203] Suitable scaffold polypeptides will in some cases be a half-life extending polypeptides. Thus, in some cases, a suitable scaffold polypeptide increases the in vivo half-life (e.g., the serum half-life) of the TMMP, compared to a control TMMP lacking the scaffold polypeptide. For example, in some cases, a scaffold polypeptide increases the in vivo half-life (e.g., the serum half-life) of the TMMP, compared to a control TMMP lacking the scaffold polypeptide, by at least about 10%, at least about 15%, at least about 20%, at least about 25%, at least about 50%, at least about 2-fold, at least about 2.5-fold, at least about 5-fold, at least about 10-fold, at least about 25-fold, at least about 50-fold, at least about 100-fold, or more than 100-fold. As an example, in some cases, an Fc polypeptide increases the in vivo half-life (e.g., the serum half-life) of the TMMP, compared to a control TMMP lacking the Fe polypeptide, by at least about 10%, at least about 15%, at least about 20%, at least about 25%, at least about 50%, at least about 2-fold, at least about 2.5-fold, at least about 5-fold, at least about 10-fold, at least about 25-fold, at least about 50-fold, at least about 100-fold, or more than 100-fold.

### Fc Polypeptides

[0204] In some cases, the first and/or the second polypeptide chain of a TMMP of the present disclosure comprises an Fe polypeptide. The Fc polypeptide of a TMMP of the present disclosure can be a human IgG1 Fc, a human IgG2 Fc, a human IgG3 Fe, a human IgG4 Fe, etc. In some cases, the Fe polypeptide comprises an amino acid sequence having at least about 70%, at least about 75%, at least about 80%, at least about 85%, at least about 90%, at least about 95%, at least about 98%, at least about 99%, or 100%, amino acid sequence identity to an amino acid sequence of an Fc region depicted in FIG. 5A-5G. In some cases, the Fc region comprises an amino acid sequence having at least about 70%, at least about 75%, at least about 80%, at least about 85%, at least about 90%, at least about 95%, at least about 98%, at least about 99%, or 100%, amino acid sequence identity to the human IgG1 Fe polypeptide depicted in FIG. 5A. In some cases, the Fe region comprises an amino acid sequence having at least about 70%, at least about 75%, at least about 80%, at least about 85%, at least about 90%, at least about 95%, at least about 98%, at least about 99%, or 100%, amino acid sequence identity to the human IgG1 Fc polypeptide depicted in FIG. 5A; and comprises a substitution of N77; e.g., the Fe polypeptide comprises an N77A substitution. In some cases, the Fe polypeptide comprises an amino acid sequence having at least about 70%, at least about 75%, at least about 80%, at least about 85%, at least about 90%, at least about 95%, at least about 98%, at least about 99%, or 100%, amino acid sequence identity to the human IgG2 Fc polypeptide depicted in FIG. 5A; e.g., the Fe polypeptide comprises an amino acid sequence having at least about 70%, at least about 75%, at least about 80%, at least about 85%, at least about 90%, at least about 95%, at least about 98%, at least about 99%, or 100%, amino acid sequence identity to amino acids 99-325 of the human IgG2 Fc polypeptide depicted in Ha 5A. In some cases, the Fc polypeptide comprises an amino acid sequence having at least about 70%, at least about 75%, at least about 80%, at least about 85%, at least about 90%, at least about 95%, at least about 98%, at least about 99%, or 100%, amino acid sequence identity to the human IgG3 Fc polypeptide depicted in FIG. 5A; e.g., the Fe polypeptide comprises an amino acid sequence having at least about 70%, at least about 75%, at least about 80%, at least about 85%, at least about 90%, at least about 95%, at least about 98%, at least about 99%, or 100%, amino acid sequence identity to amino acids 19-246 of the human IgG3 Fc polypeptide depicted in FIG. 5A. In some cases, the Fc polypeptide comprises an amino acid sequence having at least about 70%, at least about 75%, at least about 80%, at least about 85%, at least about 90%, at least about 95%, at least about 98%, at least about 99%, or 100%, amino acid sequence identity to the human IgM Fc polypeptide depicted in FIG. 5B; e.g., the Fe polypeptide comprises an amino acid sequence having at least about 70%, at least about 75%, at least about 80%, at least about 85%, at least about 90%, at least about 95%, at least about 98%, at least about 99%, or 100%, amino acid sequence identity to amino acids 1-276 to the human IgM Fe polypeptide depicted in FIG. 5B. In some cases, the Fc polypeptide comprises an amino acid sequence having at least about 70%, at least about 75%, at least about 80%, at least about 85%, at least about 90%, at least about 95%, at least about 98%, at least about 99%, or 100%, amino acid sequence identity to the human IgA Fc polypeptide depicted in FIG. 5C; e.g., the Fe polypeptide comprises an amino acid sequence having at least about 70%, at least about 75%, at least about 80%, at least about 85%, at least about 90%, at least about 95%, at least about 98%, at least about 99%, or 100%, amino acid sequence identity to amino acids 1-234 to the human IgA Fe polypeptide depicted in FIG. 5C.

[0205] In some cases, the Fe polypeptide comprises an amino acid sequence having at least about 70%, at least about 75%, at least about 80%, at least about 85%, at least about 90%, at least about 95%, at least about 98%, at least about 99%, or 100%, amino acid sequence identity to the human IgG4 Fe polypeptide depicted in FIG. 5C. In some cases, the Fe polypeptide comprises an amino acid sequence having at least about 70%, at least about 75%, at least about 80%, at least about 85%, at least about 90%, at least about 95%, at least about 98%, at least about 99%, or 100%, amino acid sequence identity to amino acids 100 to 327 of the human IgG4 Fc polypeptide depicted in FIG. 5C.

[0206] In some cases, the IgG4 Fe polypeptide comprises the following amino acid sequence:

(SEQ ID NO: 365)
PPCPSCPAPEFLGGPSVFLFPPKPKDTLMISRTPEVTCVVVDVSQEDPEV
QFNWYVDGVEVHNAKTKPREEQFNSTYRVVSVLTVLHQDWLNGKEYKCKV
SNKGLPSSIEKTISKAKGQPREPQVYTLPPSQEEMTKNQVSLTCLVKGFY
PSDIAVEWESNGQPENNYKTTPPVLDSDGSFFLYSRLTVDKSRWQEGNVF
SCSVMHEALHNHYTQKSLSLSPG.

[0207] In some cases, the Fc polypeptide present in a TMMP comprises the amino acid sequence depicted in FIG. 5A (human IgG1 Fc). In some cases, the Fc polypeptide present in a TMMP comprises the amino acid sequence depicted in FIG. 5A (human IgG1 Fc), except for a substitution of N297 (N77 of the amino acid sequence depicted in FIG. 5A) with an amino acid other than asparagine. In some cases, the Fe polypeptide present in a TMMP comprises the amino acid sequence depicted in FIG. 5C (human IgG1 Fe comprising an N297A substitution, which is N77 of the amino acid sequence depicted in FIG. 5A). In some cases, the Fc polypeptide present in a TMMP comprises the amino acid sequence depicted in FIG. 5A (human IgG1 Fe), except for a substitution of L234 (L14 of the amino acid sequence depicted in FIG. 5A) with an amino acid other than leucine. In some cases, the Fc polypeptide present in a TMMP comprises the amino acid sequence depicted in FIG. 5A (human IgG1 Fc), except for a substitution of L235 (L15 of the amino acid sequence depicted in FIG. 5A) with an amino acid other than leucine.

[0208] In some cases, the Fe polypeptide present in a TMMP comprises the amino acid sequence depicted in FIG. 5E. In some cases, the Fe polypeptide present in a TMMP comprises the amino acid sequence depicted in FIG. 5F. In some cases, the Fc polypeptide present in a TMMP comprises the amino acid sequence depicted in FIG. 5G (human IgG1 Fc comprising an L234A substitution and an L235A substitution, corresponding to positions 14 and 15 of the amino acid sequence depicted in FIG. 5G). In some cases, the Fe polypeptide present in a TMMP comprises the amino acid sequence depicted in FIG. 5A (human IgG1 Fc), except for a substitution of P331 (P111 of the amino acid sequence depicted in FIG. 5A) with an amino acid other than proline; in some cases, the substitution is a P331S substitution. In some cases, the Fe polypeptide present in a TMMP comprises the amino acid sequence depicted in FIG. 5A (human IgG1 Fe), except for substitutions at L234 and L235 (L14 and L15 of the amino acid sequence depicted in FIG. 5A) with amino acids other than leucine. In some cases, the Fc polypeptide present in a TMMP comprises the amino acid sequence depicted in FIG. 5A (human IgG1 Fe), except for substitutions at L234 and L235 (L14 and L15 of the amino acid sequence depicted in FIG. 5A) with amino acids other than leucine, and a substitution of P331 (P111 of the amino acid sequence depicted in FIG. 5A) with an amino acid other than proline. In some cases, the Fe polypeptide present in a TMMP comprises the amino acid sequence depicted in FIG. 5E (human IgG1 Fc comprising L234F, L235E, and P331 S substitutions (corresponding to amino acid positions 14, 15, and 111 of the amino acid sequence depicted in FIG. 5E). In some cases, the Fe polypeptide present in a TMMP is an IgG1 Fe polypeptide that comprises L234A and L235A substitutions (substitutions of L14 and L15 of the amino acid sequence depicted in FIG. 5A with Ala), as depicted in FIG. 5G.

### Linkers

[0209] A TMMP of the present disclosure can include one or more linkers, where the one or more linkers are between one or more of: i) an MHC Class I polypeptide and an Ig Fc polypeptide, where such a linker is referred to herein as “L1”; ii) an immunomodulatory polypeptide and an MHC Class I polypeptide, where such a linker is referred to herein as “L2”; iii) a first immunomodulatory polypeptide and a second immunomodulatory polypeptide, where such a linker is referred to herein as “L3”; iv) a peptide antigen (“epitope”) and an MHC Class 1 polypeptide; v) an MHC Class I polypeptide and a dimerization polypeptide (e.g., a first or a second member of a dimerizing pair); and vi) a dimerization polypeptide (e.g., a first or a second member of a dimerizing pair) and an IgFc polypeptide.

[0210] Suitable linkers (also referred to as “spacers”) can be readily selected and can be of any of a number of suitable lengths, such as from 1 amino acid to 25 amino acids, from 3 amino acids to 20 amino acids, from 2 amino acids to 15 amino acids, from 3 amino acids to 12 amino acids, including 4 amino acids to 10 amino acids, 5 amino acids to 9 amino acids, 6 amino acids to 8 amino acids, or 7 amino acids to 8 amino acids. A suitable linker can be 1, 2, 3, 4, 5, 6, 7, 8, 9, 10, 11, 12, 13, 14, 15, 16, 17, 18, 19, 20, 21, 22, 23, 24, or 25 amino acids in length. In some cases, a linker has a length of from 25 amino acids to 50 amino acids, e.g., from 25 to 30, from 30 to 35, from 35 to 40, from 40 to 45, or from 45 to 50 amino acids in length.

[0211] Exemplary linkers include glycine polymers (G)n, glycine-serine polymers (including, for example, (GS)n, (GSGGS)n (SEQ ID NO:366) and (GGGS)n (SEQ ID NO:367), where n is an integer of at least one), glycine-alanine polymers, alanine-serine polymers, and other flexible linkers known in the art. Glycine and glycine-serine polymers can be used; both Gly and Ser are relatively unstructured, and therefore can serve as a neutral tether between components. Glycine polymers can be used; glycine accesses significantly more phi-psi space than even alanine, and is much less restricted than residues with longer side chains (see Scheraga, Rev. Computational Chem. 11173-142 (1992)). Exemplary linkers can comprise amino acid sequences including, but not limited to, GGSG (SEQ ID NO:368), GGSGG (SEQ ID NO:369), GSGSG (SEQ ID NO:370), GSGGG (SEQ ID NO:371), GCMG (SEQ ID NO:372), GSSSG (SEQ ID NO:373), and the like. Exemplary linkers can include, e.g., Gly(Ser4)n (SEQ ID NO:374), where n is 1, 2, 3, 4, 5, 6, 7, 8, 9, or 10. In some cases, a linker comprises the amino acid sequence (GSSSS)n (SEQ ID NO:375), where n is 4. In some cases, a linker comprises the amino acid sequence (GSSSS)n (SEQ ID NO:376), where n is 5. In some cases, a linker comprises the amino acid sequence (GGGGS)n (SEQ ID NO:377), where n is 1. In some cases, a linker comprises the amino acid sequence (GGGGS)n (SEQ ID NO:378), where n is 2. In some cases, a linker comprises the amino acid sequence (GGGGS)n (SEQ ID NO:379), where n is 3. In some cases, a linker comprises the amino acid sequence (GGGGS)n (SEQ ID NO:380), where n is 4. In some cases, a linker comprises the amino acid sequence (GGGGS)n (SEQ ID NO:381), where n is 5. In some cases, a linker comprises the amino acid sequence (GGGGS)n (SEQ ID NO:382), where n is 6. In some cases, a linker comprises the amino acid sequence (GGGGS)n (SEQ ID NO:383), where n is 7, In some cases, a linker comprises the amino acid sequence (GGGGS)n (SEQ ID NO:384), where n is 8, In some cases, a linker comprises the amino acid sequence (GGGGS)n (SEQ ID NO:385), where n is 9, In some cases, a linker comprises the amino acid sequence (GGGGS)n (SEQ ID NO:386), where n is 10. In some cases, a linker comprises the amino acid sequence AAAGG (SEQ ID NO:387).

[0212] In some cases, a linker polypeptide, present in a first polypeptide of a TMMP of the present disclosure, includes a cysteine residue that can form a disulfide bond with a cysteine residue present in a second polypeptide of a TMMP of the present disclosure. In some cases, for example, a suitable linker comprises the amino acid sequence GCGGSGGGGSGGGGS (SEQ ID NO:317). As another example, a suitable linker can comprise the amino acid sequence GCGGS(G4S)n (SEQ ID NO:315), where n is 1, 2, 3, 4, 5, 6, 7, 8, or 9. For example, in some cases, the linker comprises the amino acid sequence GCGGSGGGGSGGGGSGGGGS (SEQ ID NO:316). As another example, the linker comprises the amino acid sequence GCGGSGGGGSGGGGS (SEQ ID NO:317).

### Epitopes

[0213] In some cases, an epitope (a peptide presenting one or more epitopes) present in a TMMP of the present disclosure is a human papilloma virus (HPV) peptide. An HPV peptide suitable for inclusion in a TMMP of the present disclosure can be a peptide of an HPV E6 polypeptide or an HPV E7 polypeptide. The HPV epitope can be an epitope of HPV of any of a variety of genotypes, including, e.g., HPV16, HPV18, HPV31, HPV33, HPV35, HPV39, HPV45, HPV51, HPV52, HPV56, HPV58, HPV59, HPV68, HPV73, or HPV82. In some cases, the epitope is an HPV E6 epitope. In some cases, the epitope is an HPV E7 epitope. An amino acid sequence of an HPV E6 polypeptide is presented in FIG. 3A. An amino acid sequence of an HPV E7 polypeptide is presented in FIG. 3B. An HPV peptide that presents one or more epitopes is referred to herein as an “HPV peptide” or an “HPV epitope.” In some cases, an HPV epitope present in a TMMP of the present disclosure is a peptide of from 4 to 25 contiguous amino acids (e.g., 4 amino acids (aa), 5 aa, 6 aa, 7 aa, 8 aa, 9 aa, 10-15 aa, 15-20 aa, or 20-25 aa) of an amino acid sequence having at least 90%, at least 95%, at least 98%, at least 99%, or 100%, amino acid sequence identity to the HPV E6 amino acid sequence depicted in FIG. 3A. In some cases, an HPV epitope present in a TMMP of the present disclosure is a peptide of from 4 to 25 contiguous amino acids (e.g., 4 amino acids (aa), 5 aa, 6 aa, 7 aa, 8 aa, 9 aa, 10-15 aa, 15-20 aa, or 20-25 aa) of an amino acid sequence having at least 90%, at least 95%, at least 98%, at least 99%, or 100%, amino acid sequence identity to the HPV E7 amino acid sequence depicted in FIG. 3B. In some cases, an HPV epitope present in a TMMP of the present disclosure is 6 amino acids in length. In some cases, an HPV epitope present in a TMMP of the present disclosure is 7 amino acids in length. In some cases, an HPV epitope present in a TMMP of the present disclosure is 8 amino acids in length. In some cases, an HPV epitope present in a TMMP of the present disclosure is 9 amino acids in length. In some cases, an HPV epitope present in a TMMP of the present disclosure is 10 amino acids in length. In some cases, an HPV epitope present in a TMMP of the present disclosure is 11 amino acids in length. In some cases, an HPV epitope present in a TMMP of the present disclosure is from 6 amino acids to 25 amino acids in length. In some cases, an HPV epitope present in a TMMP of the present disclosure is from 6 amino acids to 20 amino acids in length. In some cases, an HPV epitope present in a TMMP of the present disclosure is from 7 amino acids to 25 amino acids in length. In some cases, an HPV epitope present in a TMMP of the present disclosure is from 7 amino acids to 20 amino acids in length. In some cases, an HPV epitope present in a TMMP of the present disclosure is at least 4 amino acids in length, at least 6 amino acids in length, or at least 7 amino acids in length.

[0214] An epitope present in a TMMP of the present disclosure can have a length of from about 4 amino acids to about 25 amino acids, e.g., the epitope can have a length of from 4 amino acids (aa) to 10 aa, from 10 aa to 15 aa, from 15 an to 20 aa, or from 20 aa to 25 aa. For example, an epitope present in a TMMP of the present disclosure can have a length of 4 amino acids (aa), 5 aa, 6 aa, 7, aa, 8 aa, 9 aa, 10 aa, 11 aa, 12 aa, 13 aa, 14 aa, 15 aa, 16 aa, 17 aa, 18 aa, 19 aa, 20 aa, 21 aa, 22 aa, 23 aa, 24 aa, or 25 aa. In some cases, an epitope present in a TMMP has a length of from 5 amino acids to 10 amino acids, e.g., 5 aa, 6 aa, 7 aa, 8 aa, 9 aa, or 10 aa.

[0215] An HPV epitope present in a TMMP of the present disclosure is a peptide specifically bound by a T-cell, i.e., the epitope is specifically bound by an HPV epitope-specific T cell. An epitope-specific T cell binds an epitope having a reference amino acid sequence, but does not substantially bind an epitope that differs from the reference amino acid sequence. For example, an epitope-specific T cell binds an epitope having a reference amino acid sequence, and binds an epitope that differs from the reference amino acid sequence, if at all, with an affinity that is less than 10⁻⁶ M, less than 10⁻⁵ M, or less than 10⁻⁴ M. An epitope-specific T cell can bind an epitope for which it is specific with an affinity of at least 10⁻⁷ M, at least 10⁻⁸ M, at least 10⁻⁹ M, or at least 10⁻¹⁰ M.

[0216] Examples of HPV E6 peptides suitable for inclusion in a TMMP of the present disclosure include, hut are not limited to, E6 18-26 (KLPQLCTEL; SEQ ID NO:471); E6 26-34 (LQTTIHDII; SEQ ID NO:472); E6 49-57 (VYDFAFRDL; SEQ ID NO:473); E6 52-60 (FAFRDLCIV; SEQ ID NO:474); E6 75-83 (KEYSKISEY; SEQ ID NO:475); and E6 80-88 (ISEYRHYCY; SEQ ID NO:476).

[0217] Examples of HPV E7 peptides suitable for inclusion in a TMMP of the present disclosure include, but are not limited to, E7 7-15 (TLHEYMLDL: SEQ ID NO:477); E7 11-19 (YMLDLQPET; SEQ ID NO:478); E7 44-52 (QAEPDRAIIY; SEQ ID NO:479); E7 49-57 (RAIIYNIVTF (SEQ ID NO:480); E7 61-69 (CDSTLRLCV; SEQ ID NO:481); and E7 67-76 (LCVQSTHVDI; SEQ ID NO:482); E7 82-90 (LLMGTLGIV; SEQ ID NO:483); £7 86-93 (TLGIVCPI; SEQ ID NO:484); and E7 92-93 (LLMGTEGIVCPI; SEQ ID NO:485).

[0218] In some cases, a suitable HPV peptide is an HPV £6 peptide that binds HLA-A24 (e.g., is an HLA-A2401-restricted epitope). Non-limiting examples include: VYDFAFRDL (SEQ ID NO:486); CYSLYGTTL (SEQ ID NO:487); EYRHYCYSL, (SEQ ID NO:488); KLPQLCTEL (SEQ ID NO:489); DPQERPRKL (SEQ ID NO:490); HYCYSLYGT (SEQ ID NO:491); DFAFRDLCI (SEQ ID NO:492); LYGTTLEQQY (SEQ ID NO:493); HYCYSLYGTT (SEQ ID NO:494); EVYDFAFRDL (SEQ ID NO:495); EYRHYCYSLY (SEQ ID NO:496); VYDFAFRDLC (SEQ ID NO:497); YCYSIYGTFL (SEQ ID NO:498); VYCKTVLEL (SEQ ID NO:499); VYGDTLEKL (SEQ ID NO:500); and LTNTGLYNLL (SEQ ID NO:501).

[0219] In some cases, a suitable HPV peptide is selected from the group consisting of: DLQPETTDL (SEQ ID NO:502); TLHEYMLDL (SEQ ID NO:503); TPTLHEYML (SEQ ID NO:504); RAHYNIVTF (SEQ ID NO:505); GTLGIVCPI (SEQ ID NO:506); EPDRAHYNI (SEQ ID NO:507); QLFLNTLSF (SEQ ID NO:508); FQQLFLNTL (SEQ ID NO:509); and AFQQLFLNTL (SEQ ID NO:510).

[0220] In some cases, a suitable HPV peptide presents an VILA-A*2401-restricted epitope. Non-limiting examples of HPV peptides presenting an HLA-A*2401-restricted epitope are: VYDFAFRDL (SEQ ID NO:486); RAHYNIVTF (SEQ ID NO:480); CDSTLRLCV (SEQ ID NO:481); and LCVQSTHVDI (SEQ ID NO:482). In some cases, an HPV peptide suitable for inclusion in a TMMP of the present disclosure is VYDFAFRDL (SEQ ID NO:486). In some cases, an HPV peptide suitable for inclusion in a TMMP of the present disclosure is RAHYNIVTF (SEQ ID NO:480). In some cases, an HPV peptide suitable for inclusion in a TMMP of the present disclosure is CDSTLRLCV (SEQ ID NO:481). In some cases, an HPV peptide suitable for inclusion in a TMMP of the present disclosure is LCVQSTHVDI (SEQ ID NO:482).

### HLA/Peptide Binding Assays

[0221] Whether a given peptide (e.g., an HPV peptide) binds a class I HLA (comprising an HLA heavy chain and a β2M polypeptide), and, when bound to the HLA complex, can effectively present an epitope to a TCR, can be determined using any of a number of well-known methods. Assays include binding assays and T-cell activation assays.

### Cell-Based Binding Assay

[0222] As one example, a cell-based peptide-induced stabilization assay can be used to determine peptide-HLA class I binding. In this assay, a peptide of interest is allowed to bind to a TAP-deficient cell, i.e., a cell that has defective transporter associated with antigen processing (TAP) machinery, and consequently, few surface class I molecules. Such cells include, e.g., the human T2 cell line (T2 (174×CEM.T2; American Type Culture Collection (ATCC) No. CRL-1992). Henderson et al. (1992) Science 255:1264. Without efficient TAP-mediated transport of cytosolic peptides into the endoplasmic reticulum, assembled class I complexes are structurally unstable, and retained only transiently at the cell surface. However, when T2 cells are incubated with an exogenous peptide capable of binding class 1, surface peptide-HLA class I complexes are stabilized and can be detected by flow cytometry with, e.g., a pan anti-class I monoclonal antibody. The stabilization and resultant increased life-span of peptide-HLA complexes on the cell surface by the addition of a peptide validates their identity. Analysis can be carded out using flow cytometry, e.g., where the pan-HLA class I antibody comprises a fluorescent label. Binding of the peptide to various allelic forms of HLA H chains can be tested by genetically modifying the T2 cells to express an allelic HLA H chain of interest.

[0223] The following is a non-limiting example of use of a T2 assay to assess peptide binding to HLA A*0201. T2 cells are washed in cell culture medium, and concentrated to 10⁻⁶ cells/ml. Peptides of interest are prepared in cell culture medium and serially diluted providing concentrations of 200 μM, 100 μM, 20 μM and 2 μM. The cells are mixed 1:1 with each peptide dilution to give a final volume of 200 μL and final peptide concentrations of 100 μM, 50 μM, 10 μM and 1 μM. A HLA A*0201 binding peptide, GILGFVFTL, and a non-HLA A*0201-restricted peptide, HPVGEADYF (HLA-B*3501), are included as positive and negative controls, respectively. The cell/peptide mixtures are kept at 37° C. 5% CO₂ for ten minutes; then incubated at room temperature overnight. Cells are then incubated for 2 hours at 37° C. and stained with a fluorescently-labeled anti-human HLA antibody. The cells are washed twice with phosphate-buffered saline and analyzed using flow cytometry. The average mean fluorescence intensity (MFI) of the anti-HLA antibody staining is used to measure the strength of binding.

### Biochemical Binding Assay

[0224] HLA polypeptides (HLA heavy chain polypeptide complexed with β2M polypeptide) can be tested for binding to a peptide of interest in a cell-free in vitro assay system. For example, a labeled reference peptide (e.g., fluorescently labeled) is allowed to bind to HLA polypeptides (HLA heavy chain polypeptide complexed with β2M polypeptide), to form an HLA-reference peptide complex. The ability of a test peptide of interest to displace the labeled reference peptide from the HLA-reference peptide complex is tested. The relative binding affinity is calculated as the amount of test peptide needed to displace the bound reference peptide. See. e.g., van der Burg et al. (1995) Human Immunol. 44:189.

[0225] As another example, a peptide of interest can be incubated with an HLA molecule (HLA heavy chain complexed with a 02N4 polypeptide), and the stabilization of the HLA/peptide complex can be measured in an immunoassay format. The ability of a peptide of interest to stabilize an HLA molecule is compared to that of a control peptide presenting a known T-cell epitope. Detection of stabilization is based on the presence or absence of the native conformation of the HLA/peptide complex, detected using an anti-HLA antibody. See, e.g., Westrop et al. (2009) J. Immunol. Methods 341:76; Steinitz et al. (2012) Blood 119:4073; and U.S. Pat. No. 9,205,144.

### T-Cell Activation Assays

[0226] Whether a given peptide binds a class I HLA (comprising an HLA heavy chain and a β2M polypeptide), and, when bound to the HLA complex, can effectively present an epitope to a TCR, can be determined by assessing T-cell response to the peptide-HLA complex. T-cell responses that can be measured include, e.g., interferon-gamma (IFNγ) production, cytotoxic activity, and the like.

### ELISPOT Assay

[0227] Suitable assays include, e.g., an enzyme linked immunospot (ELISPOT) assay. In this assay, production of IFNγ by CD8⁺ T cells is measured following with an antigen-presenting cell (APC) that presents a peptide of interest complexed with HLA class I. Antibody to IFNγ is immobilized on wells of a multi-well plate. APCs are added to the wells, and incubated for a period of time with a peptide of interest, such that the peptide binds HLA class I on the surface of the APCs. CD8⁺ T cells specific for the peptide are added to the wells, and the plate is incubated for about 24 hours. The wells are then washed, and any IFNγ bound to the immobilized anti-IFNγ antibody is detected using a detectably labeled anti-IFNγ antibody. A colorimetric assay can be used. For example, the detectably labeled anti-IFNγ antibody can be a biotin-labeled anti-IFNγ antibody, which can be detected using, e.g., streptavidin conjugated to alkaline phosphatase. A BCIP/NBT (5-bromo-4-chloro-3-indolyl phosphate/nitro blue tetrazolium) solution is added, to develop the assay. The presence of IFNγ-secreting T cells is identified by colored spots. Negative controls include APCs not contacted with the peptide. APCs expressing various HLA H chain alleles can be used to determine whether a peptide of interest effectively binds to a HLA class I molecule comprising a particular HLA H chain.

### Cytotoxicity Assays

[0228] Whether a given peptide binds to a particular HLA class 11-1 chain and, when bound to a HLA class I complex comprising the H chain, can effectively present an epitope to a TCR, can also be determined using a cytotoxicity assay. A cytotoxicity assay involves incubation of a target cell with a cytotoxic CD8⁺ T cell. The target cell displays on its surface a peptide/HLA class I complex comprising a peptide of interest and an HLA class I molecule comprising an HLA H chain to be tested. The target cells can be radioactively labeled. e.g., with ⁵¹Cr. Whether the target cell effectively presents an epitope to a TCR on the cytotoxic CD8⁺ T cell, thereby inducing cytotoxic activity by the CD8⁺ T cell toward the target cell, is determined by measuring release of ⁵¹Cr from the lysed target cell. Specific cytotoxicity can be calculated as the amount of cytotoxic activity in the presence of the peptide minus the amount of cytotoxic activity in the absence of the peptide.

Detection of Antigen-Specific T Cells with Peptide-HLA Tetramers

[0229] As another example, multimers (e.g., tetramers) of peptide-HLA complexes are generated with fluorescent or heavy metal tags. The multimers can then be used to identify and quantify specific T cells via flow cytometry (FACS) or mass cytometry (CyTOF). Detection of epitope-specific T cells provides direct evidence that the peptide-hound HLA molecule is capable of binding to a specific TCR on a subset of antigen-specific T cells. See, e.g., Klenerman et al. (2002) Nature Reviews Immunol. 2:263.

### Immunomodulatory Polypeptides

[0230] In some cases, an immunomodulatory polypeptide present in a TMMP of the present disclosure is a wild-type immunomodulatory polypeptide. In other cases, an immunomodulatory polypeptide present in a TMMP of the present disclosure is a variant immunomodulatory polypeptide that has reduced affinity for a co-immunomodulatory polypeptide, compared to the affinity of a corresponding wild-type immunomodulatory polypeptide for the co-immunomodulatory polypeptide. Suitable immunomodulatory domains that exhibit reduced affinity for a co-immunomodulatory domain can have from 1 amino acid (aa) to 20 aa differences from a wild-type immunomodulatory domain. For example, in some cases, a variant immunomodulatory polypeptide present in a TMMP of the present disclosure differs in amino acid sequence by 1 aa, 2 an, 3 aa, 4 aa, 5 aa, 6 aa, 7 aa, 8 an, 9 aa, or 10 aa, from a corresponding wild-type immunomodulatory polypeptide. As another example, in some cases, a variant immunomodulatory polypeptide present in a TMMP of the present disclosure differs in amino acid sequence by 11 aa, 12 aa, 13 aa, 14 aa, 15 aa, 16 aa, 17 aa, 18 aa, 19 aa, or 20 aa, from a corresponding wild-type immunomodulatory polypeptide. As an example, in some cases, a variant immunomodulatory polypeptide present in a TMMP of the present disclosure includes 1, 2, 3, 4, 5, 6, 7, 8, 9, or 10 amino acid substitutions, compared to a corresponding reference (e.g., wild-type) immunomodulatory polypeptide. In some cases, variant immunomodulatory polypeptide present in a TMMP of the present disclosure includes a single amino acid substitution compared to a corresponding reference (e.g., wild-type) immunomodulatory polypeptide. In some cases, variant immunomodulatory polypeptide present in a TMMP of the present disclosure includes 2 amino acid substitutions (e.g., no more than 2 amino acid substitutions) compared to a corresponding reference (e.g., wild-type) immunomodulatory polypeptide. In some cases, variant immunomodulatory polypeptide present in a TMMP of the present disclosure includes 3 amino acid substitutions (e.g., no more than 3 amino acid substitutions) compared to a corresponding reference (e.g., wild-type) immunomodulatory polypeptide. In some cases, variant immunomodulatory polypeptide present in a TMMP of the present disclosure includes 4 amino acid substitutions (e.g., no more than 4 amino acid substitutions) compared to a corresponding reference (e.g., wild-type) immunomodulatory polypeptide. In some cases, variant immunomodulatory polypeptide present in a TMMP of the present disclosure includes 5 amino acid substitutions (e.g., no more than 5 amino acid substitutions) compared to a corresponding reference (e.g., wild-type) immunomodulatory polypeptide. In some cases, variant immunomodulatory polypeptide present in a TMMP of the present disclosure includes 6 amino acid substitutions (e.g., no more than 6 amino acid substitutions) compared to a corresponding reference (e.g., wild-type) immunomodulatory polypeptide. In some cases, variant immunomodulatory polypeptide present in a TMMP of the present disclosure includes 7 amino acid substitutions (e.g., no more than 7 amino acid substitutions) compared to a corresponding reference (e.g., wild-type) immunomodulatory polypeptide. In some cases, variant immunomodulatory polypeptide present in a TMMP of the present disclosure includes 8 amino acid substitutions (e.g., no more than 8 amino acid substitutions) compared to a corresponding reference (e.g., wild-type) immunomodulatory polypeptide. In some cases, variant immunomodulatory polypeptide present in a TMMP of the present disclosure includes 9 amino acid substitutions (e.g., no more than 9 amino acid substitutions) compared to a corresponding reference (e.g., wild-type) immunomodulatory polypeptide. In some cases, variant immunomodulatory polypeptide present in a TMMP of the present disclosure includes 10 amino acid substitutions (e.g., no more than 10 amino acid substitutions) compared to a corresponding reference (e.g., wild-type) immunomodulatory polypeptide.

[0231] In some cases, variant immunomodulatory polypeptide present in a TMMP of the present disclosure includes 11 amino acid substitutions (e.g., no more than 11 amino acid substitutions) compared to a corresponding reference (e.g., wild-type) immunomodulatory polypeptide.

[0232] In some cases, variant immunomodulatory polypeptide present in a TMMP of the present disclosure includes 12 amino acid substitutions (e.g., no more than 12 amino acid substitutions) compared to a corresponding reference (e.g., wild-type) immunomodulatory polypeptide.

[0233] In some cases, variant immunomodulatory polypeptide present in a TMMP of the present disclosure includes 13 amino acid substitutions (e.g., no more than 13 amino acid substitutions) compared to a corresponding reference (e.g., wild-type) immunomodulatory polypeptide.

[0234] In some cases, variant immunomodulatory polypeptide present in a TMMP of the present disclosure includes 14 amino acid substitutions (e.g., no more than 14 amino acid substitutions) compared to a corresponding reference (e.g., wild-type) immunomodulatory polypeptide.

[0235] In some cases, variant immunomodulatory polypeptide present in a TMMP of the present disclosure includes 15 amino acid substitutions (e.g., no more than 15 amino acid substitutions) compared to a corresponding reference (e.g., wild-type) immunomodulatory polypeptide.

[0236] In some cases, variant immunomodulatory polypeptide present in a TMMP of the present disclosure includes 16 amino acid substitutions (e.g., no more than 16 amino acid substitutions) compared to a corresponding reference (e.g., wild-type) immunomodulatory polypeptide.

[0237] In some cases, variant immunomodulatory polypeptide present in a TMMP of the present disclosure includes 17 amino acid substitutions (e.g., no more than 17 amino acid substitutions) compared to a corresponding reference (e.g., wild-type) immunomodulatory polypeptide.

[0238] In some cases, variant immunomodulatory polypeptide present in a TMMP of the present disclosure includes 18 amino acid substitutions (e.g., no more than 18 amino acid substitutions) compared to a corresponding reference (e.g., wild-type) immunomodulatory polypeptide.

[0239] In some cases, variant immunomodulatory polypeptide present in a TMMP of the present disclosure includes 19 amino acid substitutions (e.g., no more than 19 amino acid substitutions) compared to a corresponding reference (e.g., wild-type) immunomodulatory polypeptide.

[0240] In some cases, variant immunomodulatory polypeptide present in a TMMP of the present disclosure includes 20 amino acid substitutions (e.g., no more than 20 amino acid substitutions) compared to a corresponding reference (e.g., wild-type) immunomodulatory polypeptide.

[0241] As discussed above, a variant immunomodulatory polypeptide suitable for inclusion in a TMMP of the present disclosure exhibits reduced affinity for a cognate co-immunomodulatory polypeptide, compared to the affinity of a corresponding wild-type immunomodulatory polypeptide for the cognate co-immunomodulatory polypeptide.

[0242] Exemplary pairs of immunomodulatory polypeptide and cognate co-immunomodulatory polypeptide include, but are not limited to:

[0243] a) 4-1BBL (immunomodulatory polypeptide) and 4-1BB (cognate co-immunomodulatory polypeptide);

[0244] b) PD-L1 (immunomodulatory polypeptide) and PD1 (cognate co-immunomodulatory polypeptide);

[0245] c) IL-2 (immunomodulatory polypeptide) and IL-2 receptor (cognate co-immunomodulatory polypeptide);

[0246] d) CD80 (immunomodulatory polypeptide) and CD86 (cognate co-immunomodulatory polypeptide);

[0247] e) CD86 (immunomodulatory polypeptide) and CD28 (cognate co-immunomodulatory polypeptide);

[0248] f) OX40L (CD252) (immunomodulatory polypeptide) and OX40 (CD134) (cognate co-immunomodulatory polypeptide);

[0249] g) Fas ligand (immunomodulatory polypeptide) and Fas (cognate co-immunomodulatory polypeptide);

[0250] h) ICOS-L (immunomodulatory polypeptide) and ICOS (cognate co-immunomodulatory polypeptide);

[0251] i) ICAM (immunomodulatory polypeptide) and LFA-1 (cognate co-immunomodulatory polypeptide);

[0252] j) CD30L (immunomodulatory polypeptide) and CD30 (cognate co-immunomodulatory polypeptide);

[0253] k) CD40 (immunomodulatory polypeptide) and CD40L (cognate co-immunomodulatory polypeptide);

[0254] l) CD83 (immunomodulatory, polypeptide) and CD83L (cognate co-immunomodulatory polypeptide);

[0255] m) HVEM (CD270) (immunomodulatory polypeptide) and CD160 (cognate co-immunomodulatory polypeptide);

[0256] n) JAG1 (CD339) (immunomodulatory polypeptide) and Notch (cognate co-immunomodulatory polypeptide);

[0257] o) JAG1 (immunomodulatory polypeptide) and CD46 (cognate co-immunomodulatory polypeptide);

[0258] p) CD80 (immunomodulatory polypeptide) and CTLA4 (cognate co-immunomodulatory polypeptide);

[0259] q) CD86 (immunomodulatory polypeptide) and CTLA4 (cognate co-immunomodulatory polypeptide); and

[0260] r) CD70 (immunomodulatory polypeptide) and CD27 (cognate co-immunomodulatory polypeptide).

[0261] In some cases, a variant immunomodulatory polypeptide present in a TMMP of the present disclosure has a binding affinity for a cognate co-immunomodulatory polypeptide that is from 100 nM to 100 μM. For example, in some cases, a variant immunomodulatory polypeptide present in a TMMP of the present disclosure has a binding affinity for a cognate co-immunomodulatory polypeptide that is from about 100 nM to 150 nM, from about 150 nM to about 200 nM, from about 200 nM to about 250 nM, from about 250 nM to about 300 nM, from about 300 nM to about 350 nM, from about 350 nM to about 400 nM, from about 400 nM to about 500 nM, from about 500 nM to about 600 nM, from about 600 nM to about 700 nM, from about 700 nM to about 800 nM, from about 800 nM to about 900 nM, from about 900 nM to about 1 μM, to about 0.1 WM to about 5 μM, from about 5 μM to about 10 μM, from about 10 μM to about 15 μM, from about 15 μM to about 20 μL from about 20 μM to about 25 μM, from about 25 μM to about 50 μM, from about 50 μM to about 75 μM, or from about 75 μM to about 100 μM.

[0262] A variant immunomodulatory polypeptide present in a TMMP of the present disclosure exhibits reduced affinity for a cognate co-immunomodulatory polypeptide. Similarly, a TMMP of the present disclosure that comprises a variant immunomodulatory polypeptide exhibits reduced affinity for a cognate co-immunomodulatory polypeptide. Thus, for example, a TMMP of the present disclosure that comprises a variant immunomodulatory polypeptide has a binding affinity for a cognate co-immunomodulatory polypeptide that is from 100 nM to 100 μM. For example, in some cases, a TMMP of the present disclosure that comprises a variant immunomodulatory polypeptide has a binding affinity for a cognate co-immunomodulatory polypeptide that is from about 100 nM to 150 nM, from about 150 nM to about 200 nM, from about 200 nM to about 250 nM, from about 250 nM to about 300 nM, from about 300 nM to about 350 nM, from about 350 nM to about 400 nM, from about 400 nM to about 500 nM, from about 500 nM to about 600 nM, from about 600 nM to about 700 nM, from about 700 nM to about 800 nM, from about 800 nM to about 900 nM, from about 900 nM to about 1 μM, to about 1 μM to about 5 μM, from about 5 μM to about 10 μM, from about 10 μM to about 15 μM, from about 15 μM to about 20 μM, from about 20 μM to about 25 μM, from about 25 μM to about 50 μM, from about 50 μM to about 75 μM, or from about 75 μM to about 100 μM.

[0263] As depicted schematically in FIG. 16, an immunomodulatory polypeptide (i.e., one or more immunomodulatory polypeptides) can be present in a TMMP of the present disclosure at any of a variety of positions. FIG. 16 depicts the position of two copies of a variant IL-2 polypeptide; however, the immunomodulatory polypeptide can be any of a variety of immunomodulatory polypeptide, as described herein. As depicted in FIG. 16, an immunomodulatory polypeptide can be: 1) N-terminal to the MIX class I heavy chain; 2) C-terminal to the MHC class I heavy chain and N-terminal to the Ig Fe polypeptide; in other words, between the MHC class I heavy chain and the Ig Fc polypeptide; 3) C-terminal to the Ig Fc polypeptide; 4) N-terminal to the peptide epitope; or 5) C-terminal to the β2M polypeptide.

### PD-L1 Variants

[0264] As one non-limiting example, in some cases, a variant immunomodulatory polypeptide present in a TMMP of the present disclosure is a variant PD-L1 polypeptide. Wild-type PD-L1 binds to PD1.

[0265] A wild-type human PD-L1 polypeptide can comprise the following amino acid sequence:

(SEQ ID NO: 1)
MRIFAVFIFM TYWHLLNAFT VTVPKDLYVV EYGSNMTIEC
KFPVEKQLDL AALIVYWEME DKNIIQFVHG EEDLKVQHSS
YRQRARLLKD QLSLGNAALQ ITDVKLQDAG VYRCMISYGG
ADYKRITVKV NAPYNKINQR ILVVDPVTSE HELTCQAEGY
PKAEVIWTSS DHQVLSGKTT TTNSKREEKL FNVTSTLRIN
TTTNEIFYCT FRRLDPEENH TAELVIPGNI LNVSIKICLT LSPST.

[0266] A wild-type human PD-L1 ectodomain can comprise the following amino acid sequence:

(SEQ ID NO: 2)
FT VTVPKDLYVV EYGSNMTIEC KFPVEKQLDL AALIVYWEME
DKNIIQFVHG EEDLKVQHSS YRQRARLLKD QLSLGNAALQ
ITDVKLQDAG VYRCMISYGG ADYKRITVKV NAPYNKINQR
ILVVDPVTSE HELTCQAEGY PKAEVIWTSS DHQVLSGKTT
TTNSKREEKL FNVTSTLRIN TTTNEIFYCT FRRLDPEENH
TAELVIPGNI LNVSIKI.

[0267] A wild-type PD-1 polypeptide can comprise the following amino acid sequence: PGWFLDSPDR PWNPPTFSPA LLVVTEGDNA TFTCSFSNTS ESFVLNWYRM SPSNQTDKLA AFPEDRSQPG QDCRFRVTQL PNGRDFHMSV VRARRNDSGT YLCGAISLAP KAQIKESLRA ELRVTERRAE VPTAIIPSPSP RPAGQFQTLV VGVVGGLLGS LVLLVWVLAV ICSRAARGTI GARRTGQPLK EDPSAVPVFS VDYGELDFQW REKTPEPPVP CVPEQTEYAT IVFPSGMGTS SPARRGSADG PRSAQPLRPE DGHCSWPL, (SEQ ID NO:3). In some cases, where a TMMP of the present disclosure comprises a variant PD-L1 polypeptide, a “cognate co-immunomodulatory polypeptide” is a PD-1 polypeptide comprising the amino acid sequence of SEQ ID NO:3.

[0268] In some cases, a variant PD-L1 polypeptide exhibits reduced binding affinity to PL-1 (e.g., a PD-1 polypeptide comprising the amino acid sequence set forth in SEQ ID NO:3), compared to the binding affinity of a PD-L1 polypeptide comprising the amino acid sequence set forth in SEQ ID NO:1 or SEQ ID NO:2. For example, in some cases, a variant PD-L1 polypeptide of the present disclosure binds PD-1 (e.g., a PD-1 polypeptide comprising the amino acid sequence set forth in SEQ ID NO:3) with a binding affinity that is at least 10%, at least 15%, at least 20%, at least 25%, at least 30%, at least 35%, at least 40%, at least 45%, at least 50% less, at least 55% less, at least 60% less, at least 65% less, at least 70% less, at least 75% less, at least 80% less, at least 85% less, at least 90% less, at least 95% less, or more than 95% less, than the binding affinity of a PD-L1 polypeptide comprising the amino acid sequence set forth in SEQ ID NO:1 or SEQ ID NO:2.

[0269] In some cases, a variant PD-L1 polypeptide has a binding affinity to PD-1that is from 1 nM to 1 mM. In some cases, a variant PD-L1 polypeptide of the present disclosure has a binding affinity to PD-1 that is from 100 nM to 100 μM. As another example, in some cases, a variant PD-L1 polypeptide has a binding affinity for PD1 (e.g., a PD1 polypeptide comprising the amino acid sequence set forth in SEQ ID NO:3) that is from about 100 nM to 150 nM, from about 150 nM to about 200 nM, from about 200 nM to about 250 nM, from about 250 nM to about 300 nM, from about 300 nM to about 350 nM, from about 350 nM to about 400 nM, from about 400 nM to about 500 nM, from about 500 nM to about 600 nM, from about 600 nM to about 700 nM, from about 700 nM to about 800 nM, from about 800 nM to about 900 nM, from about 900 nM to about 1 μM, to about 1 μM to about 5 μM, from about 5 μM to about 10 μM, from about 10 μM to about 15 μM, from about 15 μM to about 20 μM, from about 20 μM to about 25 μM, from about 25 μM to about 50 μM, from about 50 μM to about 75 μM, or from about 75 μM to about 100 μM.

[0270] In some cases, a variant PD-L1 polypeptide has a single amino acid substitution compared to the PD-L1 amino acid sequence set forth in SEQ ID NO: 1 or SEQ ID NO:2. In some cases, a variant PD-L1 polypeptide has from 2 to 10 amino acid substitutions compared to the PD-L1 amino acid sequence set forth in SEQ ID NO:1 or SEQ ID NO:2. In some cases, a variant PD-L1 polypeptide has 2 amino acid substitutions compared to the PD-L1 amino acid sequence set forth in SEQ ID NO:1 or SEQ ID NO:2. In some cases, a variant PD-L1 polypeptide has 3 amino acid substitutions compared to the PD-L1 amino acid sequence set forth in SEQ ID NO:1 or SEQ ID NO:2. In some casts, a variant PD-L1 polypeptide has 4 amino acid substitutions compared to the PD-L1 amino acid sequence set forth in SEQ ID NO:1 or SEQ ID NO:2. In some cases, a variant PD-L1 polypeptide has 5 amino acid substitutions compared to the PD-L1 amino acid sequence set forth in SEQ ID NO:1 or SEQ ID NO:2. In some cases, a variant PD-L1 polypeptide has 6 amino acid substitutions compared to the PD-L1 amino acid sequence set forth in SEQ ID NO:1 or SEQ ID NO:2. In some cases, a variant. PD-L1 polypeptide has 7 amino acid substitutions compared to the PD-L1 amino acid sequence set forth in SEQ ID NO:1 or SEQ ID NO:2. In some cases, a variant PD-L1 polypeptide has 8 amino acid substitutions compared to the PD-L1 amino acid sequence set forth in SEQ ID NO:1 or SEQ ID NO:2. In some cases, a variant PD-L1 polypeptide has 9 amino acid substitutions compared to the PD-L1 amino acid sequence set forth in SEQ 11) NO:1 or SEQ ID NO:2. In some cases, a variant PD-L1 polypeptide has 10 amino acid substitutions compared to the PD-L1 amino acid sequence set forth in SEQ ID NO: 1 or SEQ ID NO:2.

[0271] A suitable PD-L1 variant includes a polypeptide that comprises an amino acid sequence having at least 90%, at least 95%, at least 98%, at least 99%, or 100%, amino acid sequence identity to the following amino acid sequence:

[0272] FT VTVPKXLYVV EYGSNMTIEC KFPVEKQLDL AALIVYWEME DKNIIQFVHG EEDLKVQHSS YRQRARLLKD QLSLGNAALQ ITDVKLQDAG VYRCMISYGG ADYKRITVKV NAPYNKINQR ILVVDPVTSE HELTCQAEGY PKAEVIWTSS DHQVLSGKTT TTNSKREEKL FNVTSTLRIN TTTNEIFYCT FRRLDPEENH TAELVIPGNI LNVSIKI (SEQ ID NO: 52), where X is any amino acid other than Asp. In some cases, X is Ala. In some cases, X is Arg.

[0273] A suitable PD-L1 variant includes a polypeptide that comprises an amino acid sequence having at least 90%, at least 95%, at least 98%, at least 99%, or 100%, amino acid sequence identity to the following amino acid sequence:

[0274] FT VTVPKDLYVV EYGSNMTIEC KFPVEKQLDL AALXVYWEME DKNIIQFVHG EEDLKVQHSS YRQRARLLKD QLSLGNAALQ ITDVKLQDAG VYRCMISYGG ADYKRITVKV NAPYNKINQR ILVVDPVTSE HELTCQAEGY PKAEVIWTSS DHQVLSGKTT TTNSKREEKL FNVTSTLRIN TITNEIFYCT FRRLDPEENH TAELVIPGNI LNVSIKI (SEQ ID NO: 53), where X is any amino acid other than Ile. In some cases. X is Asp.

[0275] A suitable PD-L1 variant includes a polypeptide that comprises an amino acid sequence having at least 90%, at least 95%, at least 98%, at least 99%, or 100%, amino acid sequence identity to the following amino acid sequence:

[0276] FT VTVPKDLYVV EYGSNMTIEC KFPVEKQLDL AALIVYWEME DKNIIQFVHC EXDLKVQHSS YRQRARLLKD QLSLGNAALQ ITDVKLQDAG VYRCMISYGG ADYKRITVKV NAPYNKINQR ILVVDPVTSE HELTCQAEGY PKAEVIWTSS DHQVLSGKTT TTNSKREEKL FNVTSTLRIN TTTNEIFYCT FRRLDPEENH TAELVIPGNI LNVSIKI (SEQ ID NO:54), where X is any amino acid other than Glu. In some cases, X is Arg.

### CD80 Variants

[0277] In some cases, a variant immunomodulatory polypeptide present in a TMMP of the present disclosure is a variant CD80 polypeptide. Wild-type CD80 binds to CD28. Wild-type CD80 also binds to CD86.

[0278] A wild-type amino acid sequence of the ectodomain of human CD80 can be as follows:

(SEQ ID NO: 4)
VIHVTK EVKEVATLSC GHNVSVEELA QTRIYWQKEK KMVLTMMSGD
MNIWPEYKNR TIFDITNNLS IVILALRPSD EGTYECVVLK
YEKDAFKREH LAEVTLSVKA DFPTPSISDF EIPTSNIRRI
ICSTSGGFPE PHLSWLENGE ELNAINTTVS QDPETELYAV
SSKLDFNMTT NHSFMCLIKY GHLRVNQTFN WNTTKQEHFP DN.

[0279] A wild-type CD28 amino acid sequence can be as follows: MLRLLLALNL FPSIQVTGNK TINKQSPVIN AYDNAVNLSC, KYSYNLFSRE FRASLHKGLD SAVEVCVVYG NYSQQTAQVYS KTCENCDCKL GNESVIFYLQ NLYVNQTDIY FCKIEVMYPP PYLDNEXSNG TIIHVKGKHL CPSPLFPGPS KPFWVLVVVG GVLACYSLLV TVAFIIFWVR SKRSRLLHSD YVINVITPRRPG PTRKHYQPYA PPRDFANYRS (SEQ ID NO:5). In some cases, where a TMMP of the present disclosure comprises a variant CD80 polypeptide, a “cognate co-immunomodulatory polypeptide” is a CD28 polypeptide comprising the amino acid sequence of SEQ ID NO:5.

[0280] A wild-type CD28 amino acid sequence can be as follows: MLRLLLALNL FPSIQVTGNK ILVKQSPMLV AYDNAVNLSW KIILCPSPLFP GPSKPFWVLV VVGGVLACYS LLVTVAFIIF WVRSKRSRLL HSDYMNMTPR RPGPTRKHYQ PYAPPRDFAA YRS (SEQ ID NO:6)

[0281] A wild-type CD28 amino acid sequence can be as follows: MLRLLLALNL FPSIQVTGKH LCPSPLFPGP SKPFWVLVVV GGVLACYSLL VTVAHIFWV RSKRSRLLHS DYMNMTPRRP GPTRKHYQPY APPRDFAAYR S (SEQ ID NO:7).

[0282] In some cases, a variant CD80 polypeptide exhibits reduced binding affinity to CD28, compared to the binding affinity of a CD80 polypeptide comprising the amino acid sequence set forth in SEQ ID NO:4 for CD28. For example, in some cases, a variant CD80 polypeptide binds CD28 with a binding affinity that is at least 10%, at least 15%, at least 20%, at least 25%, at least 30%, at least 35%, at least 40%, at least 45%, at least 50% less, at least 55% less, at least 60% less, at least 65% less, at least 70% less, at least 75% less, at least 80% less, at least 85% less, at least 90% less, at least 95% less, or more than 95% less, than the binding affinity of a CD80 polypeptide comprising the amino acid sequence set forth in SEQ ID NO:4 for CD28 (e.g., a CD28 polypeptide comprising the amino acid sequence set forth in one of SEQ ID NO:5, 6, or 7).

[0283] In some cases, a variant CD80 polypeptide has a binding affinity to CD28 that is from 100 nM to 100 μM. As another example, in some cases, a variant CD80 polypeptide of the present disclosure has a binding affinity for CD28 (e.g., a CD28 polypeptide comprising the amino acid sequence set forth in SEQ ID NO:5, SEQ ID NO:6, or SEQ ID NO:7) that is from about 100 nM to 150 nM, from about 150 nM to about 200 nM, from about 200 nM to about 250 nM, from about 250 nM to about 300 nM, from about 300 nM to about 350 nM, from about 350 nM to about 400 nM, from about 400 nM to about 500 nM, from about 500 nM to about 600 nM, from about 600 nM to about 700 nM, from about 700 nM to about 800 nM, from about 800 nM to about 900 nM, from about 900 nM to about 1 μM, to about 1 μM to about 5 μM, from about 5 μM to about 10 μM, from about 10 μM to about 15 μM, from about 15 μM to about 20 μM, from about 20 μM to about 25 μM, from about 25 μM to about 50 μM, from about 50 μM to about 75 μM, or from about 75 μM to about 100 μM.

[0284] In some cases, a variant CD80 polypeptide has a single amino acid substitution compared to the CD80 amino acid sequence set forth in SEQ ID NO:4. In some cases, a variant CD80 polypeptide has from 2 to 10 amino acid substitutions compared to the CD80 amino acid sequence set forth in SEQ ID NO:4. In some cases, a variant CD80 polypeptide has 2 amino acid substitutions compared to the CD80 amino acid sequence set forth in SEQ ID NO:4. In some cases, a variant CD80 polypeptide has 3 amino acid substitutions compared to the CD80 amino acid sequence set forth in SEQ ID NO:4. In some cases, a variant CD80 polypeptide has 4 amino acid substitutions compared to the CD80 amino acid sequence set forth in SEQ ID NO:4. In some cases, a variant CD80 polypeptide has 5 amino acid substitutions compared to the CD80 amino acid sequence set forth in SEQ ID NO:4. In some cases, a variant CD80 polypeptide has 6 amino acid substitutions compared to the CD80 amino acid sequence set forth in SEQ ID NO:4. In some cases, a variant CD80 polypeptide has 7 amino acid substitutions compared to the CD80 amino acid sequence set forth in SEQ ID NO:4. In some cases, a variant CD80 polypeptide has 8 amino acid substitutions compared to the CD80 amino acid sequence set forth in SEQ ID NO:4. In some cases, a variant CD80 polypeptide has 9 amino acid substitutions compared to the CD80 amino acid sequence set forth in SEQ ID NO:4. In some cases, a variant CD80 polypeptide has 10 amino acid substitutions compared to the CD80 amino acid sequence set forth in SEQ ID NO:4.

[0285] Suitable CD80 variants include a polypeptide that comprises an amino acid sequence having at least 90%, at least 95%, at least 98%, at least 99%, or 100%, amino acid sequence identity to any one of the following amino acid sequences:

[0286] VHIVTK EVKEVATLSC GHXVSVEELA QTRIYWQKEK KMVLTMMSGD MNIWPEYKNR TIFDITNNLS IVILALRPSD EGTYECVVLK YEKDAFKREH LAEVTLSVKA DFPTPSISDF EIPTSNIRRI TCSTSGGFPE PHLSWLENGE ELNAINTTVS QDPETELYAV SSKLDFNMTT NIISFMCLIKY GHLRVNQTFN WNTTKQEHFP DN (SEQ ID NO: 55), where X is any amino acid other than Asn. In some cases, X is Ala;

[0287] VIHVTK EVKEVATLSC GHNVSVEELA QTRIYWQKEK KMVLTMMSGD MNIWPEYKNR TIFDITXNLS IVILALRPSD EGTYECVVLK YEKDAFKREH LAEVTLSVKA DFPTPSISDF EIPTSNIRRI ICSTSGGFPE PHLSWLENGE ELNAINTTVS QDPETELYAV SSKLDFNMTT NHSFMCLIKY GHLRVNQTFN WNTTKQEHFP UN (SEQ ID NO: 56), where X is any amino acid other than Asn. In some cases, X is Ala;

[0288] VIHVTK EVKEVATLSC GHNVSVEELA QTRIYWQKEK. KMVLTMMSGD MNIWPEYKNR TIFDITNNLS XVILALRPSD EGTYECVVLK YEKDAFKREH LAEVTLSVKA DFPTPSISDF EIPTSNIRRI ICSTSGGFPE PHLSWLENGE ELNAINTTVS QDPETELYAV SSKLDFNMTT NHSFMCLIKY GHLRVNQTFN WNTTKQEHFP DN (SEQ ID NO:57), where X is any amino acid other than Ile. In some cases, X is Ala;

[0289] VIHVTK EVKEVATLSC GHNVSVEELA QTRIYWQKEK KMVLTMMSGD MNIWPEYKNR TIFDITNNLS IVILALRPSD EGTYECVVLX YEKDAFKREH LAEVTLSVKA DFPTPSISDF EIPTSNIRRI ICSTSGGFPE PHLSWLENGE ELNAINTTVS QDPETELYAV SSKLDFNMTT NHSFMCLIKY GHLRVNQTFN WNTTKQEHFP DN (SEQ ID NO:58), where X is any amino acid other than Lys. In some cases, X is Ala;

[0290] VIHVTK EVKEVATLSC GHNVSVEELA QTRIYWQKEK KMVLTMMSGD MNIWPEYKNR TIFDITNNLS IVILALRPSD EGTYECVVLK YEKDAFKREH LAEVTLSVKA DFPTPSISDF EIPTSNIRRI ICSTSGGFPE PHLSWLENGE ELNAINTTVS XDPETELYAV SSKLDFNMTT NHSFMCLIKY GHLRVNQTFN WNTTKQEHFP UN (SEQ ID NO:60), where X is any amino acid other than Gln. In some cases, X is Ala;

[0291] VIHVTK EVKEVATLSC GHNVSVEELA QTRIYWQKEK KMVLTMMSGD MNIWPEYKNR TIFDITNNLS IVILALRPSD EGTYECVVLK YEKDAFKREH LAEVTLSVKA DFPTPSISDF EIPTSNIRRI ICSTSGGFPE PHLSWLENGE ELNAINTTVS QXPETELYAV SSKLDFNMTT NHSFMCLIKY GHLRVNQTFN WNTTKQEHFP DN (SEQ ID NO:61), where X is any amino acid other than Asp. In some cases, X is Ala;

[0292] VIHVTK EVKEVATLSC GHNVSVEEXA QTRIYWQKEK KMVLTMMSGD MNIWPEYKNR TIFDITNNLS IVILALRPSD EGTYECVVLK YEKDAFKREH LAEVTLSVKA DFPTPSISDF EIPTSNIRRI ICSTSGGFPE PHLSWLENGE ELNAINTTVS QDPETELYAV SSKLDFNMTT NHSFMCLIKY GHLRVNQTFN WNTTKQEHFP UN (SEQ ID NO:62), where X is any amino acid other than Leu. In some cases, X is Ala;

[0293] VIHVTK EVKEVATLSC GHNVSVEELA QTRIXWQKEK KMVLTMMSGD MNIWPEYKNR TIFDITNNLS IVILALRPSD EGTYECVVLK YEKDAFKREH LAEVTLSVKA DFPTPSISDF EIPTSNIRRI ICSTSGGFPE PHLSWLENGE ELNAINTTVS QDPETELYAV SSKLDFNMTT NHSFMCLIKY GHLRVNQTFN WNTTKQEHFP DN (SEQ ID NO:63), where X is any amino acid other than Tyr. In some cases, X is Ala;

[0294] VIHVTK EVKEVATLSC GHNVSVEELA QTRIYWXKEK KMVLTMMSGD MNIWPEYKNR TIFDITNNLS IVILALRPSD EGTYECVVLK YEKDAFKREH LAEVTLSVKA DFPTPSISDF EIPTSNIRRI ICSTSGGFPE PHLSWLENGE ELNAINTTVS QDPETELYAV SSKLDFNMTT NHSFMCLIKY GHLRVNQTFN WNTTKQEHFP DN (SEQ ID NO:64), where X is any amino acid other than Gin. In some cases, X is Ala;

[0295] VIHVTK EVKEVATLSC GHNVSVEELA QTRIYWQKEK KXVLTMMSGD MNIWPEYKNR TIFDITNNLS IVILALRPSD EGTYECVVLK YEKDAFKREH LAEVTLSVKA DFPTPSISDF EIPTSNIRRI ICSTSGGFPE PHLSWLENGE ELNAINTTVS QDPETELYAV SSKLDFNMTT NHSFMCLIKY GHLRVNQTFN WNTTKQEHFP DN (SEQ ID NO:65), where X is any amino acid other than Met. In some cases, X is Ala;

[0296] VIHVTK EVKEVATLSC GHNVSVEELA QTRIYWQKEK KMXLTMMSGD MNIWPEYKNR TIFDITNNLS IVILALRPSD EGTYECVVLK YEKDAFKREH LAEVTLSVKA DFPTPSISDF EIPTSNIRRI ICSTSGGFPE PHLSWLENGE ELNAINTTVS QDPETELYAV SSKLDFNMTT NHSFMCLIKY GHLRVNQTFN WNTTKQEHFP UN (SEQ ID NO:66), where X is any amino acid other than Val. In some cases, X is Ala;

[0297] VIHVTK EVKEVATLSC GHNVSVEELA QTRIYWQKEK. KMVLTMMSGD MNXWPEYKNR TIFDITNNLS IVILALRPSD EGTYECVVLK YEKDAFKREH LAEVTLSVKA DFPTPSISDF EIPTSNIRRI ICSTSGGFPE PHLSWLENGE ELNAINTTVS QDPETELYAV SSKLDFNMTT NHSFMCLIKY GHLRVNQTFN WNTTKQEHFP DN (SEQ ID NO:67), where X is any amino acid other than Ile. In some cases, X is Ala;

[0298] VIHVTK EVKEVATLSC GHNVSVEELA QTRIYWQKEK KMVLTMMSGD MNIWPEXKNR TIFDITNNLS IVILALRPSD EGTYECVVLK YEKDAFKREH LAEVTLSVKA DFPTPSISDF EIPTSNIRRI ICSTSGGFPE PHLSWLENGE ELNAINTTVS QDPETELYAV SSKLDFNMTT NHSFMCLIKY GHLRVNQTFN WNTTKQEHFP DN (SEQ ID NO:68), where X is any amino acid other than Tyr. In some cases, X is Ala;

[0299] VIHVTK EVKEVATLSC GHNVSVEELA QTRIYWQKEK KMVLTMMSGD MNIWPEYKNR TIFDITNNLS IVILALRPSD EGTYECVVLK YEKDAFKREH LAEVTLSVKA DFPTPSISDF EIPTSNIRRI ICSTSGGFPE PHLSWLENGE ELNAINTTVS QDPETELYAV SSKLDFNMTT NHSFMCLIKY GHLRVNQTFN WNTTKQEHFP DN (SEQ ID NO:69), where X is any amino acid other than Asp. In some cases. X is Ala;

[0300] VIHVTK EVKEVATLSC GHNVSVEELA QTRIYWQKEK KMVLTMMSGD MNIWPEYKNR TIFDITNNLS IVILALRPSD EGTYECVVLK YEKDAFKREH LAEVTLSVKA DXPTPSISDF EIPTSNIRRI ICSTSGGFPE PHLSWLENGE ELNAINTTVS QDPETELYAV SSKLDFNMTT NHSFMCLIKY GHLRVNQTFN WNTTKQEHFP DN (SEQ ID NO:70), where X is any amino acid other than Phe. In some cases, X is Ala;

[0301] VIHVTK EVKEVATLSC GHNVSVEELA QTRIYWQKEK KMVLTMMSGD MNIWPEYKNR TIFDITNNLS IVILALRPSD EGTYECVVLK YEKDAFKREH LAEVTLSVKA DEPTPSISDF EIPTSNIRRI ICSTSGGFPE PHLSWLENGE ELNAINTTVX QDPETELYAV SSKLDFNMTT NHSFMCLIKY GHLRVNQTFN WNTTKQEHFP DN (SEQ ID NO:71), where X is any amino acid other than Ser. In some cases, X is Ala; and

[0302] VIHVTK EVKEVATLSC GHNVSVEELA QTRIYWQKEK KMVLTMMSGD MNIWPEYKNR TIFDITNNLS IVILALRPSD EGTYECVVLK YEKDAFKREH LAEVTLSVKA DEPTXSISDF EIPTSNIRRI ICSTSGGFPE PHLSWLENGE ELNAINTTVS QDPETELYAV SSKLDFNMTT NHSFMCLIKY GHLRVNQTFN WNTTKQEHFP ON (SEQ ID NO:72), where X is any amino acid other than Pro. In some cases, X is Ala.

### CD86 Variants

[0303] In some cases, a variant immunomodulatory polypeptide present in a TMMP of the present disclosure is a variant CD86 polypeptide. Wild-type CD86 binds to CD28. In some cases, where a TMMP of the present disclosure comprises a variant CD86 polypeptide, a “cognate co-immunomodulatory polypeptide” is a CD28 polypeptide comprising the amino acid sequence of SEQ ID NO:5.

[0304] The amino acid sequence of the full ectodomain of a wild-type human CD86 can be as follows:

(SEQ ID NO: 8)
APLKIQAYFNETADLPCQFANSQNQSLSELVVFWQDQENLVLNEVYLGKE
KFDSVHSKYMNRTSFDSDSWTLRLHNLQIKDKGLYQCIIHHKKPTGMIRI
HQMNSELSVLANFSQPEIVPISNITENVYINLTCSSIHGYPEPKKMSVLL
RTKNSTIEYDGIMQKSQDNVTELYDVSISLSVSFPDVTSNMTIFCILETD
KTRLLSSPFSIELEDPQPPPDHIP.

[0305] The amino acid sequence of the IgV domain of a wild-type human CD86 can be as follows:

(SEQ ID NO: 9)
APLKIQAYFNETADLPCQFANSQNQSLSELVVFWQDQENLVLNEVYLGKE
KFDSVHSKYMNRTSFDSDSWTLRLHNLQIKDKGLYQCIIHHKKPTGMIRI
HQMNSELSVL.

[0306] In some cases, a variant CD86 polypeptide exhibits reduced binding affinity to CD28, compared to the binding affinity of a CD86 polypeptide comprising the amino acid sequence set forth in SEQ ID NO:8 or SEQ ID NO:9 for CD28. For example, in some cases, a variant CD86 polypeptide binds CD28 with a binding affinity that is at least 10%, at least 15%, at least 20%, at least 25%, at least 30%, at least 35%, at least 40%, at least 45%, at least 50% less, at least 55% less, at least 60% less, at least 65% less, at least 70% less, at least 75% less, at least 80% less, at least 85% less, at least 90% less, at least 95% less, or more than 95% less, than the binding affinity of a CD86 polypeptide comprising the amino acid sequence set forth in SEQ ID NO:8 or SEQ ID NO:9 for CD28 (e.g., a CD28 polypeptide comprising the amino acid sequence set forth in one of SEQ ID NO:5, 6, or 7).

[0307] In some cases, a variant CD86 polypeptide has a binding affinity to CD28 that is from 100 nM to 100 μM. As another example, in some cases, a variant CD86 polypeptide of the present disclosure has a binding affinity for CD28 (e.g., a CD28 polypeptide comprising the amino acid sequence set forth in one of SEQ ID NOs:5, 6, or 7) that is from about 100 nM to 150 nM, from about 150 nM to about 200 nM, from about 200 nM to about 250 nM, from about 250 nM to about 300 nM, from about 300 nM to about 350 nM, from about 350 nM to about 400 nM, from about 400 nM to about 500 nM, from about 500 nM to about 600 nM, from about 600 nM to about 700 nM, from about 700 nM to about 800 nM, from about 800 nM to about 900 nM, from about 900 nM to about 1 μM, to about 1 μM to about 5 μM, from about 5 μM to about 10 μM, from about 10 μM to about 15 μM, from about 15 μM to about 20 μM, from about 20 μM to about 25 μM, from about 25 μM to about 50 μM, from about 50 μM to about 75 μM, or from about 75 μM to about 100 μM.

[0308] In some cases, a variant CD86 polypeptide has a single amino acid substitution compared to the CD86 amino acid sequence set forth in SEQ ID NO:8. In some cases, a variant CD86 polypeptide has from 2 to 10 amino acid substitutions compared to the CD86 amino acid sequence set forth in SEQ ID NO:8. In some cases, a variant CD86 polypeptide has 2 amino acid substitutions compared to the CD86 amino acid sequence set forth in SEQ ID NO:8. In some cases, a variant CD86 polypeptide has 3 amino acid substitutions compared to the CD86 amino acid sequence set forth in SEQ ID NO:8. In some cases, a variant CD86 polypeptide has 4 amino acid substitutions compared to the CD86 amino acid sequence set forth in SEQ ID N0:8. In some cases, a variant CD86 polypeptide has 5 amino acid substitutions compared to the CD86 amino acid sequence set forth in SEQ ID NO:8. In some cases, a variant CD86 polypeptide has 6 amino acid substitutions compared to the CD86 amino acid sequence set forth in SEQ ID NO:8. In some cases, a variant CD86 polypeptide has 7 amino acid substitutions compared to the CD86 amino acid sequence set forth in SEQ ID NO:8. In some cases, a variant CD86 polypeptide has 8 amino acid substitutions compared to the CD86 amino acid sequence set forth in SEQ ID NO:8. In some cases, a variant CD86 polypeptide has 9 amino acid substitutions compared to the CD86 amino acid sequence set forth in SEQ ID NO:8. In some cases, a variant CD86 polypeptide has 10 amino acid substitutions compared to the CD86 amino acid sequence set forth in SEQ ID NO:8.

[0309] In seine cases, a variant CD86 polypeptide has a single amino acid substitution compared to the CD86 amino acid sequence set forth in SEQ ID NO:9. In some cases, a variant CD86 polypeptide has from 2 to 10 amino acid substitutions compared to the CD86 amino acid sequence set forth in SEQ ID NO:9. In some cases, a variant CD86 polypeptide has 2 amino acid substitutions compared to the CD86 amino acid sequence set forth in SEQ ID NO:9. In some cases, a variant CD86 polypeptide has 3 amino acid substitutions compared to the CD86 amino acid sequence set forth in SEQ ID NO:9. In some cases, a variant CD86 polypeptide has 4 amino acid substitutions compared to the CD86 amino acid sequence set forth in SEQ ID NO:9. In some cases, a variant CD86 polypeptide has 5 amino acid substitutions compared to the CD86 amino acid sequence set forth in SEQ ID NO:9. In some cases, a variant CD86 polypeptide has 6 amino acid substitutions compared to the CD86 amino acid sequence set forth in SEQ ID NO:9. In some cases, a variant CD86 polypeptide has 7 amino acid substitutions compared to the CD86 amino acid sequence set forth in SEQ ID NO:9. In some cases, a variant CD86 polypeptide has 8 amino acid substitutions compared to the CD86 amino acid sequence set forth in SEQ ID NO:9. In some cases, a variant CD86 polypeptide has 9 amino acid substitutions compared to the CD86 amino acid sequence set forth in SEQ ID NO:9. In some cases, a variant CD86 polypeptide has 10 amino acid substitutions compared to the CD86 amino acid sequence set forth in SEQ ID NO:9.

[0310] Suitable CD86 variants include a polypeptide that comprises an amino acid sequence having at least 90%, at least 95%, at least 98%, at least 99%, or 100%, amino acid sequence identity to any one of the following amino acid sequences:

[0311] APLKIQAYFNETADIPCQFANSQNQSLSEINVFWQWENLVLNEVYLGKEKFDSVHSKYM XRTSFDSDSWTLRLHNLQIKDKGLYQCIIHHKKPTGMIRIHQMITISELSVLANFSQPEIVPISNITENVYI NLTCSSTHCYPEPKKVSVLLRTKNSTIEYDGIMQKSQDNVTELYDVSISLSVSFPDVTSNMTIFCILETD KTRLLSSPFSIELEDPQPPPDHIP (SEQ ID NO:73), where X is any amino acid other than Asn. In some cases, X is Ala;

[0312] APLKIQAYFNETADIPCQFANSQNQSLSELVVFWQDQENLVLNEVYLGKEKFDSVHSKYM NRTSFXSDSWTLRLIINLQIKDKGLYQCIIHHKKPTGMIRIHQMNSELSVLANFSQTEIVPISNITENVYI NLTCSSIHGYPEPKKMSVLLRTKNSTIEYDGIMQKSQDNVTELYDVSISLSVSFPDVTSNMTIFCILETD KTRLLSSPFSSIELEDPQPPPDHIP (SEQ ID NO:74), where X is any amino acid other than Asp. In some cases, X is Ala;

[0313] APLKIQAYFNETADLPCOFANSQNQSLSELVVFWQDQENLVLNEVYLGKEKFDSVHSKYM NRTSFDSDSXTLRLHNLQIKDKGLYQCIIHHKKPTGMIRIHQMNSELSVLANFSQPEIVPISNITENVYI NLTCSSIHGYPEPKKMSVLLRTKNSTIEYDGIMQKSQNVTELYDVSISLSVSFPDVTSNMTIFCILETD KTRLLSSPFSIELEDPQPPPDHIP (SEQ ID NO:75), where X is any amino acid other than Trp. In some cases, X is Ala;

[0314] APLKIQAYFNETADLPCqFANSQNQSLSELVVFWQDQENLVLNEVYLGKEKFDSVHSKYM NRTSFDSDSWTLRLHNLQIKDKGLYQCIIHXKKPTGMIRIHQMNSELSVLANFSQPEIVPISNITENVYI NLTCSSIHGYPEPKKMSVLLRTKNSTIEYDGIMQKSQDNVTELYDVSISLSVSFPDVTSNMTIFCILETD KTRLLSSPFSIELEDPQPPPDHIP (SEQ ID NO:76), where X is any amino acid other than His. In some cases, X is Ala;

[0315] APLKIQAYFNETADLPCQFANSQNQSLSELVVFWQDQENLVLNEVYLGKEKFDSVHSKYM XRTSFDSDSWTLRLHNLQIKDKGLYQCIIHHKKPTGMIRIHQMNSELSVL (SEQ ID NO:77), where X is any amino acid other than Asn. In some cases, X is Ala;

[0316] APLKIQAYFNETADIPCQFANSQNQSLSELVVFWQDQENLVLNEVYLGKEKFDSVHSKYM NRTSFXSDSWTLRLHNLQIKDKGLYQCIIHHKKPTGMIRIHQMNSELSVL (SEQ ID NO:78), where X is any amino acid other than Asp. In some cases. X is Ala;

[0317] APLKIQAYFNETADLPCQFANSQNQSLSELVVFWQDQENLVLNEVYLGKEKFDSVHSKYM NRTSFDSDXTLRLHNLQIKDKGLYQCIIHHKKPTGMIRIHQMNSELSVL (SEQ ID NO:79), where X is any amino acid other than Trp. In some cases. X is Ala;

[0318] APLKIQAYFNETALPCQFANSQNQSLSELVVFWQDQENLVLNEVYLGKEKFDSVHSKYM NRTSFDSDSWTLRLHNLQIKDKGLYQCIIHXKKPTGMIRIHQMNSELSVL (SEQ ID NO:80), where X is any amino acid other than His. In some cases, X is Ala;

[0319] APLKIQAYFNETADLPCQFANSQNQSLSELVVFWQDQENLXLNEVYLGKEKFDSVHSKYM NRTSFDSDSWTLRLHNLQIKDKGLYQCIIHHKKPTGMIRIHQMNSELSVLANFSQPEIVPISNITENVYI NLTCSSIHCYPEPKKMSVLLRTKNSTIEYDCIMQKSQDNVTELYDVSISLSVSFPDVTSNMTIFCILETD KTRLLSSPFSIELEDPQPPPDNIP (SEQ ID NO:81), where X is any amino acid other than Val. In some cases, X is Ala;

[0320] APLKIQAYFNETADLPCQFANSQNQSLSELVVFWQDQENLXLNEVYLGKEKFDSVHSKYM NRTSFDSDSWTLRLHNLQIKDKGLYQCIHHKKPTGMIRIHQMNSELSVL (SEQ ID NO:82), where X is any amino acid other than Val. In some cases, X is Ala;

[0321] APLKIQAYFNETADLPCQFANSQNQSLSELVVFWXDQENLVLNEVYLGKEKFDSVHSKYM NRTSFDSDSWTLRLHNLQTKDKGLYQCIIHHKKPTGMIRIHQMNSELSVLANFSQPEIVPISNITENVYI NLTCSSIHGYPEPKKMSVLLRTKNSTIEYDGIMQKSQDNVTELYDVSISLSVSFPDVTSNMTIFCILETD KTRLLSSPFSIELEDPQPPPDHIP (SEQ ID NO:83), where X is any amino acid other than Gln. In some cases, X is Ala;

[0322] APLKIQAYFNETADLPCQFANSQNQSLSELVVFWXDQENLVLNEVYLGKEKFDSVHSKYM NRTSFDSDSWTLRLHNLQIKDKGLYQCIIHHLLPTGMIRIHQMNSELSVL (SEQ ID NO:84), where X is any amino acid other than Gin. In some cases, X is Ala;

[0323] APLKIQAYFNETADLPCQFANSQNQSLSELVVXWQDGENLVLNEVYLGKEKFDSVHSKYM nRTSFDSDSWTLRLHNLQIKDKGLYQCIIHHKKPTGMIRIHQMNSELSVLANFSQEIVPISNITENVYI NLTCSSIHGYPEPKKMSVLLRTKNSTIEYDGIMQKSQDNVTELYDVSISLSVEFPDVTSNMTIFCILETD KTRLLSSPFSIELEDPQPPPDHIP (SEQ ID NO:85), where X is any amino acid other than Phe. In some cases, X is Ala;

[0324] APLKIQAYFNETADLPCQFANSQNQSLSELVVXWDGQENLVLNEVYLGKEKFDSVHSKYM NRTSFDSDSWTLRLHNLQIKDKGLYQCIIHHKKPTGMIRIHQMNSELSVL (SEQ ID NO:86), where X is any amino acid other than Phe. In some cases, X is Ala;

[0325] APLKIQAYFNETADLPCQFANSQNQSLSELVVFWQDENLVLNEVYLGKEKFDSVHSKYM NRTSFDSDSWTXRLHNLQIKDKGLYQCIIHHKKPTCMIRIHQMNSELSVLANFSQEIVPISNITENVYI NLTCSSIHGYPEPKKMSVLLRTKNSTIEYDGIMQKSQDNVTELYDVSISLSVSFPDVTSNMTIFCILETD KTRLLSSPFSIELEDPQPPPDHIP (SEQ ID NO:87), where X is any amino acid other than Leu. In some cases, X is Ala;

[0326] APLKIQAYFNETADLPCQFANSQNQSLSELVVFWQDQENLVLNEVYLGKEKFDSVHSKYM NRTSFDSDSWTXRLHNLQIKDKGLYQCIIHHKKPTGMIRIHQMNSELSVLANFSQPEIVPISNITENVYI any amino acid other than Leu. In some cases, X is Ala;

[0327] APLKIQAYFNETADLPCQFANSQNQSLSELVVFWQDQENLVLNEVYLGKEKFDSVHSKXM NRTSFDSDSWTLRLHNLQIKDKGLYQCIIHHKKPTCMIRIHQMNSELSVLANFSQPEIVPISNITENVYI NLTCSSIHGYPEPKKMSVLLRTKNSTIEYDGIMQKSQDNVTELYDVSISLSVSFPPDVTSNMTIFCILETD KTRLLSSPFSIELEDPQPPPDHIP (SEQ ID NO:89), where X is any amino acid other than Tyr. In some cases, X is Ala;

[0328] APLKIQAYFNETADLPCQFANSQNQSLSELVVFWQDQENLVLNEVYLGKEKFDSVHSKXM NRTSFDSDSWTLRLHNLQIKDKGLYQCIIHHKKPTGMIRIHQMNSELSVL (SEQ ID NO:90), where X is any amino acid other than Tyr. In some cases, X is Ala;

[0329] APLKIQAYFNETADLPCQFANSQNQSLSELVVFWQDQENLVLNEVYLGKEKFDSVHSKYM XRTSFDSDSWTLRLHNLQIKDKGLYQCIIHXKKPTGMIRIHQMNSELSVLANFSQPEIVPISNITENVYI NLTCSSIHGYPEPKKMSVLLRTKNSTIEYDGIMQKSQDNVTELYDVSISLSVSFPDVTSNMTIFCILETD KTRLLSSPFSIELDEDPQPPPDHIP (SEQ ID NO:91), where the first X is any amino acid other than Asn and the second X is any amino acid other than Wis. In some cases, the first and the second X are both Ala;

[0330] APLKIQAYFNETADLPCQFANSQNQSLSELVVFWQDQENLVLNEVYLGKEKFDSVHSKYM XRTSFDSDSWTLRLHNLQIKDKGLYQCIIHXKKPTGMIRIHQMNSELSVL (SEQ ID NO:92), where the first X is any amino acid other than Asn and the second X is any amino acid other than His. In some cases, the first and the second X are both Ala;

[0331] APLKIQAYFNETADLPCQFANSQNQSLSELVVFWQDQENLVLNEVYLGKEKFDSVHSKYM NRTSFX₁SDSWTLRLHNLQIKDKGLYQCIIHX₂KKPTGMIRIHQMNSELSVLANFSQPEIVPISNITENVY INLTCSSSIHGYPEPKKMSVLLRTKNSTIYDGIMQKSQDNVTELYDVSISLSVSFPDVTSNMTIFCILET DKTRLLSSPFSIELEDPQPPPDHIP (SEQ ID NO:93), where X₁ is any amino acid other than Asp, and X₂ is any amino acid other than His. In some cases, X₁ is Ala and X₂ is Ala;

[0332] APLKIQAYFNETALPCQFANSQNQSLSELVVFWQDQENLVLNEVYLGKEKFDSVHSKYM NRTSFX₁SDSWTLRLHNLQIKDKGLYQCIIHX₂KKPTGMIRIHQMNSELSVL (SEQ ID NO:94), where the first X is any amino acid other than Asn and the second X is any amino acid other than His. In some cases, the first and the second X are both Ala;

[0333] APLKIQAYFNETADLPCQFANSQNQSLSELVVFWQDQENLVLNEVYLGKEKFDSVHSKYM X₁RTSFX₂SDSWTLRLHNLQIKDKGLYQCIIHX₃KKPTGMIRIHQMNSELSVLANFSQPEIVPISNITENV YINLTCSSIHGYPEPKKMSVLLRTKNSTIEYDGIMQKSQDNVTELYDVSISLSVSFPDVTSNMTIFCILE TDKTRLLSSPFSIELEDPQPPPDHIP (SEQ ID NO:95), where X₁ is any amino acid other than Asn, X₂ is any amino acid other than Asp, and X₃ is any amino acid other than His. In some cases, X₁ is Ala, X₂ is Ala, and X₃ is Ala; and

[0334] APLKIQAYFNETADLPCQFANSQNQSLSELVVFWQDQENLVLNEVYLGKEKFDSVHSKYM X₁RTSFX₂SDSWTLRLHNLQIKDKGLYQCIIHX₃KKPTGMIRIHQMNSELSVL (SEQ ID NO:96), where X₁ is any amino acid other than Asn, X₂ is any amino acid other than Asp, and X₁ is any amino acid other than His. In some cases, X₁ is Ala, X₂ is Ala, and X₃ is Ala.

### 4-1 BBL Variants

[0335] In some cases, a variant immunomodulatory polypeptide present in a TMMP of the present disclosure is a variant 4-1BBL polypeptide. Wild-type 4-1BBL binds to 4-1BB (CD137).

[0336] A wild-type 4-1BBL amino acid sequence can be as follows: MEYASDASLD PEAPWPPAPR ARACRVLPWA LVAGLLLLLL LAAACAVFLA CPWAVSGARA SPGSAASPRL REGPELSPDD PAGLLDLRQG MFAQLVAQNV LLIDGPLSWY SDPGLAGVSL TGGLSYKEDT KELVVAKAGV YYVFFQLELR RVVAGEGSGS VSLALHLQPL RSAAGAAALA LTVDLPPASS EARNSAFGFQ GRLLHLSAGQ RLGVHLHTEA RARHAWQLTQ GATVLGLFRV TPEIPAGLPS PRSE (SEQ ID NO: 10).

[0337] In some cases, a variant 4-1BBL polypeptide is a variant of the tumor necrosis factor (TNF) homology domain (THD) of human 4-1BBL.

[0338] A wild-type amino acid sequence of the THD of human 4-1BBL can be, e.g., one of SEQ ID NOs:11-13, as follows:

(SEQ ID NO: 11)
PAGLLDLRQG MFAQLVAQNV LLIDGPLSWY SDPGLAGVSL
TGGLSYKEDT KELVVAKAGV YYVFFQLELR RVVAGEGSGS
VSLALHLQPL RSAAGAAALA LTVDLPPASS EARNSAFGFQ
GRLLHLSAGQ RLGVHLHTEA RARHAWQLTQ GATVLGLFRV
TPEIPAGLPS PRSE.
(SEQ ID NO: 12)
D PAGLLDLRQG MFAQLVAQNV LLIDGPLSWY SDPGLAGVSL
TGGLSYKEDT KELVVAKAGV YYVFFQLELR RVVAGEGSGS
VSLALHLQPL RSAAGAAALA LTVDLPPASS EARNSAFGFQ
GRLLHLSAGQ RLGVHLHTEA RARHAWQLTQ GATVLGLFRV
TPEIPAGLPS PRSE.
(SEQ ID NO: 13)
D PAGLLDLRQG MFAQLVAQNV LLIDGPLSWY SDPGLAGVSL
TGGLSYKEDT KELVVAKAGV YYVFFQLELR RVVAGEGSGS
VSLALHLQPL RSAAGAAALA LTVDLPPASS EARNSAFGFQ
GRLLHLSAGQ RLGVHLHTEA RARHAWQLTQ GATVLGLFRV
TPEIPA.

[0339] A wild-type 4-1BB amino acid sequence can be as follows: MGNSCYNIVA TLLLVLNFER TRSLQDPCSN CPAGTFCDNN RNQICSPCPP NSFSSAGGQR TCDICRQCKG VFRTRKECSS TSNAECDCTP GFHCLGAGCS MCEQDCKQGQ ELTKKGCKDC CFGTFNDQKR GICRPWTNCS LDGKSVLVNG TKERDVVCGP SPADLSPGAS SVTPPAPARE PGHSPQHSF FLALTSTALL FLLFFLTLRF SVVKRGRKKL LYIFKQPFMR PVQTTQEEDG CSCRFPEEEE GGCEL (SEQ ID NO:14). In some cases, where a TMMP of the present disclosure comprises a variant 4-1BBL polypeptide, a “cognate co-immunomodulatory polypeptide” is a 4-1 BB polypeptide comprising the amino acid sequence of SEQ ID NO:14.

[0340] In some cases, a variant 4-1BBL polypeptide exhibits reduced binding affinity to 4-1BB, compared to the binding affinity of a 4-1BBL polypeptide comprising the amino acid sequence set forth in one of SEQ ID NOs:10-13. For example, in some cases, a variant 4-1BBL polypeptide of the present disclosure binds 4-1BB with a binding affinity that is at least 10% less, at least 15% less, at least 20% less, at least 25%, at least 30% less, at least 35% less, at least 40% less, at least 45% less, at least 50% less, at least 55% less, at least 60% less, at least 65% less, at least 70% less, at least 75% less, at least 80% less, at least 85% less, at least 90% less, at least 95% less, or more than 95% less, than the binding affinity of a 4-1BBL polypeptide comprising the amino acid sequence set forth in one of SEQ ID NOs:10-13 for a 4-1BB polypeptide (e.g., a 4-1BB polypeptide comprising the amino acid sequence set forth in SEQ ID NO:14), when assayed under the same conditions.

[0341] In some cases, a variant 4-1 BBL polypeptide has a binding affinity to 4-1BB that is from 100 nM to 100 μM. As another example, in some cases, a variant 4-1BBL polypeptide has a binding affinity for 4-113B (e.g., a 4-1BB polypeptide comprising the amino acid sequence set forth in SEQ ID NO:14) that is from about 100 nM to 150 nM, from about 150 nM to about 200 nM, from about 200 nM to about 250 nM, from about 250 nM to about 300 nM, from about 300 nM to about 350 nM, from about 350 nM to about 400 nM, from about 400 nM to about 500 nM, from about 500 nM to about 600 nM, from about 600 nM to about 700 nM, from about 700 nM to about 800 nM, from about 800 nM to about 900 nM, from about 900 nM to about 1 μM, to about 1 μM to about 5 μM, from about 5 μM to about 10 from about 10 μM to about 15 μM, from about 15 μM to about 20 μM, from about 20 μM to about 25 μM, from about 25 μM to about 50 μM, from about 50 μM to about 75 μM, or from about 75 μM to about 100 μM.

[0342] In some cases, a variant 4-1BBL polypeptide has a single amino acid substitution compared to the 4-1BBL amino acid sequence set forth in one of SEQ ID NOs:10-13. In some cases, a variant 4-1BBL polypeptide has from 2 to 10 amino acid substitutions compared to the 4-1B131, amino acid sequence set forth in one of SEQ ID NOs:10-13. In some cases, a variant 4-1BBL polypeptide has 2 amino acid substitutions compared to the 4-1BBL amino acid sequence set forth in one of SEQ ID NOs:10-13. In some cases, a variant 4-1BBL polypeptide has 3 amino acid substitutions compared to the 4-1BBL amino acid sequence set forth in one of SEQ ID NOs:10-13. In some cases, a variant 4-1BBL polypeptide has 4 amino acid substitutions compared to the 4-1BBL amino acid sequence set forth in one of SEQ ID NOs:10-13. In some cases, a variant 4-1BBL polypeptide has 5 amino acid substitutions compared to the 4-1BBL amino acid sequence set forth in one of SEQ ID NOs:10-13. In some cases, a variant 4-1BBL polypeptide has 6 amino acid substitutions compared to the 4-1BBL amino acid sequence set forth in one of SEQ ID NOs: 10-13. In some cases, a variant 4-1BBL polypeptide has 7 amino acid substitutions compared to the 4-1BBL amino acid sequence set forth in one of SEQ ID NOs:10-13. In some cases, a variant 4-1BBL polypeptide has 8 amino acid substitutions compared to the 4-1BBL amino acid sequence set forth in one of SEQ ID NOs:10-13. In some cases, a variant 4-1BBL polypeptide has 9 amino acid substitutions compared to the 4-1BBL amino acid sequence set forth in one of SEQ 10 NOs:10-13. In some cases, a variant 4-1BBL polypeptide has 10 amino acid substitutions compared to the 4-1BBL amino acid sequence set forth in one of SEQ ID NOs:10-13.

[0343] Suitable 4-1BBL variants include a polypeptide that comprises an amino acid sequence having at least 90%, at least 95%, at least 98%, at least 99%, or 100%, amino acid sequence identity to any one of the following amino acid sequences:

[0344] PAGLLDLRQG MFAQLVAQNV LLIDGPLSWY SDPGLAGVSL TGGLSYXEDT KELVVAKAGV YYVFFQLELR RVVAGEGSGS VSLALHLQPL RSAAGAAALA LTVDLPPASS EARNSAFGFQ GRLLHLSAGQ RLGVHLHTEA RARHAWQLTQ GATVLGLFRV TPEIPAGLPS PRSE (SEQ 10 NO: 97), where X is any amino acid other than Lys. In some cases, X is Ala;

[0345] PAGLLDLRQG MFAQLVAQNV LLIDGPLSWY SDPGLAGVSL TGGLSYKEDT KELVVAKAGV YYVITQLELR RVVAGEGSGS VSLALHLQPL RSAAGAAALA LTVDLPPASS EARNSAFGFQ GRLLHLSAGQ RLGVHLHTEA RARHAWXLTQ GATVLGLFRV TPEIPAGLPS PRSE (SEQ ID NO: 98), where X is any amino acid other than Gin. In some cases, X is Ala;

[0346] PAGLLDLRQG XFAQLVAQNV LLIDGPLSWY SDPGLAGVSL TGGLSYKEDT KELVVAKAGV YYVFFQLELR RVVAGEGSGS VSLALHLQPL RSAAGAAALA LTVDLPPASS EARNSAFGFQ GRLLHLSAGQ RLGVHLHTEA RARHAWQLTQ GATVLGLFRV TPEIPAGLPS PRSE (SEQ ID NO: 99), where X is any amino acid other than Met. In some cases, X is Ala;

[0347] PAGLLDLRQG MXAQLVAQNV LLIDGPLSWY SDPGLAGVSL TGGLSYKEDT KELVVAKAGV YYVFFQLELR RVVAGEGSGS VSLALHLQPL RSAAGAAALA LTVDLPPASS EARNSAFGFQ GRLLHLSAGQ RLGVHLHTEA RARHAWQLTQ GATVLGLFRV TPEIPAGLPS PRSE (SEQ ID NO: 100), where X is any amino acid other than Phe. In some cases, X is Ala;

[0348] PAGLLDLRQG MFAXLVAQNV LLIDGPLSWY SDPGLAGVSL TGGLSYKEDT KELVVAKAGV YYVFFQLELR RVVAGEGSGS VSLALHLQPL RSAAGAAALA LTVDLPPASS EARNSAFGFQ GRLLHLSAGQ RLGVHLHTEA RARHAWQLTQ GATVLGLFRV TPEIPAGLPS PRSE (SEQ ID NO:101), where X is any amino acid other than Gln. In some cases, X is Ala;

[0349] PAGLLDLRQG MFAQXVAQNV LLIDGPLSWY SDPGLAGVSL TGGLSYKEDT KELVVAKAGV YYVFFQLELR RVVAGEGSGS VSLALHLQPL RSAAGAAALA LTVDLPPASS EARNSAFGFQ GRLLIILSAGQ RLGVHLHTEA RARHAWQLTQ GATVLGLFRV TPEIPAGLPS PRSE (SEQ ID NO:102), where X is any amino acid other than Leu. In some cases, X is Ala;

[0350] PAGLLDLRQG MFAQLXAQNV LLIDGPLSWY SDPGLAGVSL TGGLSYKEDT KELVVAKAGV YYVFFQLELR RVVAGEGSGS VSLALHLQPL RSAAGAAALA LTVDLPPASS EARNSAFGFQ GRLLHLSAGQ RLGVHLHTEA RARHAWQLTQ GATVLGLFRV TPEIPAGLPS PRSE (SEQ ID NO:103), where X is any amino acid other than Val. In some cases, X is Ala;

[0351] PAGLLDLRQG MFAQLVAQXV LLIDGPLSWY SDPGLAGVSL TGGLSYKEDT KELVVAKAGV YYVFFQLELR RVVAGEGSGS VSLALHLQPL RSAAGAAALA LTVDLPPASS EARNSAFGFQ GRLLHLSAGQ RLGVHLHTEA RARHAWQLTQ GATVLGLFRV TPEIPAGLPS PRSE (SEQ ID NO:104), where X is any amino acid other than Gin. In some cases, X is Ala;

[0352] PAGLLDLRQG MFAQLVAQNX LLIDGPLSWY SDPGLAGVSL TGGLSYKEDT KELVVAKAGV YYVFFQLELR RVVAGEGSGS VSLALHLQPL RSAAGAAALA LTVDLPPASS EARNSAFGFQ GRLLHLSAGQ RLGVHLHTEA RARHAWQLTQ GATVLGLFRV TPEIPAGLPS PRSE (SEQ ID NO:105), where X is any amino acid other than Asn. In some cases, X is Ala;

[0353] PAGLLDLRQG MFAQLVAQNX XLIDGPLSWY SDPGLAGVSL TGGLSYKEDT KELVVAKAGV YYVFFQLELR RVVAGEGSGS VSLALHLQPL RSAAGAAALA LTVDLPPASS EARNSAFGFQ GRLLHLSAGQ RLGVHLHTEA RARHAWQLTQ GATVLGLFRV TPEIPAGLPS PRSE (SEQ ID NO:106), where X is any amino acid other than Val. In some cases, X is Ala;

[0354] PAGLLDLRQG MFAQLVAQNV XLIDGPLSWY SDPGLAGVSL TGGLSYKEDT KELVVAKAGV YYVFFQLELR RVVAGEGSGS VSLALHLQPL RSAAGAAALA LTVDLPPASS EARNSAFGFQ GRLLHLSAGQ RLGVHLHTEA RARHAWQLTQ GATVLGLFRV TPEIPAGLPS PRSE (SEQ ID NO:107), where X is any amino acid other than Leu. In some cases, X is Ala;

[0355] PAGLLDLRQG MFAQLVAQNV LXIDGPLSWY SDPGLAGVSL TGGLSYKEDT KELVVAKAGV YYVFFQLELR RVVAGEGSGS VSLALHLQPL RSAAGAAALA LTVDLPPASS EARNSAFGFQ GRLLHLSAGQ RLGVHLHTEA RARHAWQLTQ GATVLGLFRV TPEIPAGLPS PRSE (SEQ ID NO:108), where X is any amino acid other than Leu. In some cases, X is Ala;

[0356] PAGLLDLRQG MFAQLVAQNV LLXDGPLSWY SDPGLAGVSL, TGGLSYKEDT KELVVAKAGV YYVFFQLELR RVVAGEGSGS VSLALHLQPL RSAAGAAALA LTVDLPPASS EARNSAFGFQ GRLLHLSAGQ RLGVHLHTEA RARHAWQLTQ GATVLGLFRV TPEIPAGLPS PRSE (SEQ ID NO:109), where X is any amino acid other than Ile. In some cases, X is Ala;

[0357] PAGLLDLRQG MFAQLVAQNV LLIXGPLSWY SDPGLAGVSL TGGLSYKEDT KELVVAKAGV YYVFFQLELR RVVAGEGSGS VSLALHLQPL RSAAGAAALA LTVDLPPASS EARNSAFGFQ GRILHLSAGQ RLGVHLHTEA RARHAWQLTQ GATVLGLFRV TPEIPAGLPS PRSE (SEQ ID NO:110), where X is any amino acid other than Asp. In some cases, X is Ala;

[0358] PAGLLDLRQG MFAQLVAQNV LLIDXPLSWY SDPGLAGVSL TGGLSYKEDT KELVVAKAGV YYVFFQLELR RVVAGEGSGS VSLALHLQPL RSAAGAAALA LTVDLPPASS EARNSAFGFQ GRLLHLSAGQ RLGVHLHTEA RARHAWQLTQ GATVLGLFRV TPEIPAGLPS PRSE (SEQ ID NO:111), where X is any amino acid other than Gly. In some cases, X is Ala;

[0359] PAGLLDLRQG MFAQLVAQNV LLIGGXLSWY SDPGLAGVSL TGGLSYKEDT KELVVAKAGV YYVFFQLELR RVVAGEGSGS VSLALHLQPL RSAAGAAALA LTVDLPPASS EARNSAFGFQ GRLLHLSAGQ RLGVHLHTEA RARHAWQLTQ GATVLGLFRV TPEIPAGLPS PRSE (SEQ ID NO:112), where X is any amino acid other than Pro. In some cases, X is Ala;

[0360] PAGLLDLRQG MFAQLVAQNV LLIGGPXSWY SDPGLAGVSL TGGLSYKEDT KELVVAKAGV YYVFFQLELR RVVAGEGSGS VSLALHLQPL RSAAGAAALA LTVDLPPASS EARNSAFGFQ GRLLHLSAGQ RLGVHLHTEA RARHAWQLTQ GATVLGLFRV TPEIPAGLPS PRSE (SEQ ID NO:113), where X is any amino acid other than Leu. In some cases, X is Ala;

[0361] PAGLLDLRQG MFAQLVAQNV LLIGGPLXWY SDPGLAGVSL TGGLSYKEDT KELVVAKAGV YYVFFQLELR RVVAGEGSGS VSLALHLQPL RSAAGAAALA LTVDLPPASS EARNSAFGFQ GRLLHLSAGQ RLGVHLHTEA RARHAWQLTQ GATVLGLFRV TPEIPAGLPS PRSE (SEQ ID NO:114), where X is any amino acid other than Ser. In some cases, X is Ala;

[0362] PAGLLDLRQG MFAQLVAQNV LLIGGPLSXY SDPGLAGVSL TGGLSYKEDT KELVVAKAGV YYVFFQLELR RVVAGEGSGS VSLALHLQPL RSAAGAA ALA LTVDLPPASS EARNSAFGFQ GRLLHLSAGQ RLGVHLHTEA RARHAWQLTQ GATVLGLFRV TPEIPAGLPS PRSE (SEQ ID NO:115), where X is any amino acid other than Tip. In some cases, X is Ala;

[0363] PAGLLDLRQG MFAQLVAQNV LLIGGPLSWX SDPGLAGVSL TGGLSYKEDT KELVVAKAGV YYVFFQLELR RVVAGEGSGS VSLALHLQPL RSAAGAAALA LTVDLPPASS EARNSAFGFQ GRLLHLSAGQ RRLGVHLHTEA RARHAWQLTQ GATVLGLFRV TPEIPAGLPS PRSE (SEQ ID NO:116), where X is any amino acid other than Tyr. In some cases, X is Ala;

[0364] PAGLLDLRQG MFAQLVAQNV LLIGGPLSWY XDPGLAGVSL TGGLSYKEDT KELVVAKAGV YYVFFQLELR RVVAGEGSGS VSLALHLQPL RSAAGAAALA LTVDLPPASS EARNSAFGFQ GRLLHLSAGQ RLGVHLHTEA RARHAEWLTQ GATVLGLFRV TPEIPAGLPS PRSE (SEQ ID NO:117), where X is any amino acid other than Ser. In some cases, X is Ala;

[0365] PAGLLDLRQG MFAQLVAQNV LLIGGPLSWY SXPGLAGVSL TGGLSYKEDT KELVVAKAGV YYVFFQLELR RVVAGEGSGS VSLALHLQPL RSAAGAAALA LTVDLPPASS EARNSAFGFQ GRLLHLSAGQ RLGVHLHTEA RARHAWQLTQ GATVLGLFRV TPEIPAGLPS PRSE (SEQ ID NO:118), where X is any amino acid other than Asp. In some cases, X is Ala;

[0366] PAGLLDLRQG MFAQLVAQNV LLIGGPLSWY SDXGLAGVSL TGGLSYKEDT KELVVAKAGV YYVFFQLELR RVVAGEGSGS VSLALHLQPL RSAAGAAALA LTVDLPPASS EARNSAFGFQ GRLLHLSAGQ RLGVHLHTEA RARHAWQLTQ GATVLGLFRV TPEIPAGLPS PRSE (SEQ ID NO:119), where X is any amino acid other than Pro. In some cases, X is Ala;

[0367] PAGLLDLRQG MFAQLVAQNV LLIGGPLSWY SDPGXLAGVSL TGGLSYKEDT KELVVAKAGV YYVFFQLELR RVVAGEGSGS VSLALHLQPL RSAAGAAALA LTVDLPPASS EARNSAFGFQ GRLLHLSAGQ RLGVHLHTEA RARHAWQLTQ GATVLGLFRV TPEIPAGLPS PRSE (SEQ ID NO:120), where X is any amino acid other than Gly. In some cases, X is Ala;

[0368] PAGLLDLRQG MFAQLVAQNV LLIGGPLSWY SDPGXAGVSL TGGLSYKEDT KELVVAKAGV YYVFFQLELR RVVAGEGSGS VSLALHLQPL RSAAGAAALA LTVDLPPASS EARNSAFGFQ GRLLHLSAGQ RLGVHLHTEA RARHAWQLTQ GATVLGLFRV TPEIPAGLPS PRSE (SEQ ID NO:1.21), where X is any amino acid other than Leu. In some cases, X is Ala;

[0369] PAGLLDLRQG MFAQLVAQNV LLIGGPLSWY SDPGLAXVSL TGGLSYKEDT KELVVAKAGV YYVFFQLELR RVVAGEGSGS VSLALHLQPL RSAAGAAALA LTVDLPPASS EARNSAFGFQ GRLLHLSAGQ RLGVHLHTEA RARHAWQLTQ GATVLGLFRV TPEIPAGLPS PRSE (SEQ ID NO:122), where X is any amino acid other than Gly. In some cases, X is Ala;

[0370] PAGLLDLRQG MFAQLVAQNV LLIGGPLSWY SDPGLAGXSL TGGLSYKEDT KELVVAKAGV YYVFFQLELR RVVAGEGSGS VSLALHLQPL RSAAGAAALA LTVDLPPASS EARNSAFGFQ GRLLHLSAGQ RLGVHLIITEA RARHAWQLTQ GATVLGLFRV TPEIPAGLPS PRSE (SEQ ID NO:1.23), where X is any amino acid other than Val. In some cases, X is Ala;

[0371] PAGLLDLRQG MFAQLVAQNV LLIGGPLSWY SDPGLAGVXL TGGLSYKEDT KELVVAKAGV YYVFFQLELR RVVAGEGSGS VSLALHLQPL RSAAGAAALA LTVDLPPASS EARNSAFGFQ GRLLHLSAGQ RLGVHLHTEA RARHAWQLTQ GATVLGLFRV TPEIPAGLPS PRSE (SEQ ID NO:124), where X is any amino acid other than Ser. In some cases. X is Ala;

[0372] PAGLLDLRQG MFAQLVAQNV LLIGGPLSWY SDPGLAGVSX TGGLSYKEDT KELVVAKAGV YYVFFQLELR RVVAGEGSGS VSLALHLQPL RSAAGAAALA LTVDLPPASS EARNSAFGFQ GRLLHLSAGQ RLGVHLHTEA RARHAWQLTQ GATVLGLFRV TPEIPAGLPS PRSE (SEQ ID NO:125), where X is any amino acid other than Leu. In some cases, X is Ala;

[0373] PAGLLDLRQG MFAQLVAQNV LLIGGPLSWY SDPGLAGVSL XGGLSYKEDT KELVVAKAGV YYVFEQLELR RVVAGEGSGS VSLALHLQPL RSAAGAAALA LTVDLPPASS EARNSAFGFQ GRLLHLSAGQ RLGVHLHTEA RARHAWQLTQ GATVLGLFRV TPEIPAGLPS PRSE (SEQ ID NO:126), where X is any amino acid other than Thr. In some cases, X is Ala;

[0374] PAGLLDLRQG MFAQLVAQNV LLIGGPLSWY SDPGLAGVSL TXGLSYKEDT KELVVAKAGV YYVFFQLELR RVVAGEGSGS VSLALHLQPL RSAAGAAALA LTVDLPPASS EARNSAFGFQ GRLLHLSAGQ RLGVHLHTEA RARHAWQLTQ GATVLGLFRV TPEIPAGLPS PRSE (SEQ ID NO:127), where X is any amino acid other than Gly. In some cases, X is Ala;

[0375] PAGLLDLRQG MFAQLVAQNV LLIGGPLSWY SDPGLAGVSL TGXLSYKEDT KELVVAKAGV YYVFFQLELR RVVAGEGSGS VSLALHLQPL RSAAGAAALA LTVDLPPASS EARNSAFGFQ GRLLHLSAGQ RLGVHLHTEA RARHAWQLTQ GATVLGLFRV TPEIPAGLPS PRSE (SEQ ID NO:128), where X is any amino acid other than Gly. In some cases, X is Ala;

[0376] PAGLLDLRQG MFAQLVAQNV LLIGGPLSWY SDPGLAGVSL TGGXSYKEDT KELVVAKAGV YYVFFQLELR RVVAGEGSGS VSLALHLQPL RSAAGAAALA LTVDLPPASS EARNSAFGFQ GRLLHLSAGQ RLGVHLHTEA RARHAWQLTQ GATVLGLFRV TPEIPAGLPS PRSE (SEQ ID NO:129), where X is any amino acid other than Leu. In some cases, X is Ala;

[0377] PAGLLDLRQG MFAQLVAQNV LLIGGPLSWY SDPGLAGVSL TGGLXYKEDT KELVVAKAGV YYVFFQLELR RVVAGEGSGS VSLALHLQPL RSAAGAAALA LTVDLPPASS EARNSAFGFQ GRLLHLSAGQ RLGVHLHTEA RARHAWQLTQ GATVLGLFRV TPEIPAGLPS PRSE (SEQ IT) NO:130), where X is any amino acid other than Ser. In some cases, X is Ala;

[0378] PAGLLDLRQG MFAQLVAQNV LLIGGPLSWY SDPGLAGVSL TGGLSXKEDT KELVVAKAGV YYVFFQLELR RVVAGEGSGS VSLALHLQPL RSAAGAAALA LTVDLPPASS EARNSAFGFQ GRLLHLSAGQ RLGVHLHTEA RARHAWQLTQ GATVLGLFRV TPEIPAGLPS PRSE (SEQ ID NO:131), where X is any amino acid other than Tyr. In some cases, X is Ala;

[0379] PAGLLDLRQG MFAQLVAQNV LLIGGPLSWY SDPGLAGVSL TGGLSYKXDT KELVVAKAGV YYVFFQLELR RVVAGEGSGS VSLALHLQPL RSAAGAAALA LTVDLPPASS EARNSAFGFQ GRLLHLSAGQ RLGVHLHTEA RARHAWQLTQ GATVLGLFRV TPEIPAGLPS PRSE (SEQ ID NO:132), where X is any amino acid other than Glu. In some cases, X is Ala;

[0380] PAGLLDLRQG MFAQLVAQNV LLIGGPLSWY SDPGLAGVSL TGGLSYKEXT KELVVAKAGV YYVFFQLELR RVVAGEGSGS VSLALHLQPL RSAAGAAALA LTVDLPPASS EARNSAFGFQ GRLLHLSAGQ FLGVHLHTEA RARHAWQLTQ GATVLGLFRV TPEIPAGLPS PRSE (SEQ ID NO:133), where X is any amino acid other than Asp. In some cases, X is Ala;

[0381] PAGLLDLRQG MFAQLVAQNV LLIGGPLSWY SDPGLAGVSL TGGLSYKEDX KELVVAKAGV YYVFFQLELR RVVAGEGSGS VSLALHLQPL RSAAGAAALA LTVDLPPASS EARNSAFGFQ GRLLHLSAGQ RLGVHLHTEA RARHAWQLTQ GATVLGLFRV TPEIPAGLPS PRSE (SEQ ID NO:134), where X is any amino acid other than Thr. In some cases, X is Ala;

[0382] PAGLLDLRQG MFAQLVAQNV VAQNV LLIGGPLSWY SDPGLAGVSL TGGLSYKEDT XELVVAKAGV YYVFFQLELR RVVAGEGSGS VSLALHLQPL RSAAGAAALA LTVDLPPASS EARNSAFGFQ GRLLHLSAGQ RLGVHLHTEA RARHAWQLTQ GATVLGLFRV TPEIPAGLPS PRSE (SEQ ID NO:135), where X is any amino acid other than Lys. In some cases, X is Ala;

[0383] PAGLLDLRQG MFAQLVAQNV LLIGGPLSWY SDPGLAGVSL TGGLSYKEDT KXLVVAKAGV YYVFFQLELR RVVAGEGSGS VSLALHLQPL RSAAGAAALA LTVDLPPASS EARNSAFGFQ GRLLHLSAGQ RLGVHLHTEA RARHAWQLTQ GATVLGLFRV TPEIPAGLPS PRSE (SEQ ID NO:136), where X is any amino acid other than Glu. In some cases, X is Ala;

[0384] PAGLLDLRQG MFAQLVAQNV LLIGGPLSWY SDPGLAGVSL TGGLSYKEDT KELVVAKAGV YYVXFQLELR RVVAGEGSGS VSLALHLQPL RSAAGAAALA LTVDLPPASS EARNSAFGFQ GRLLHLSAGQ RLGVHLHTEA RARHAWQLTQ GATVLGLFRV TPEIPAGLPS PRSE (SEQ ID NO:137), where X is any amino acid other than Phe. In some cases, X is Ala;

[0385] PAGLLDLRQG MFAQLVAQNV LLIGGPLSWY SDPGLAGVSL TGGLSYKEDT KELVVAKAGV YYVFXQLELR RVVAGEGSGS VSLALHLQPL RSAAGAAALA LTVDLPPASS EARNSAFGFQ GRLLHLSAGQ RLGVHLHTEA RARHAWQLTQ GATVLGLFRV TPEIPAGLPS PRSE (SEQ ID NO:138), where X is any amino acid other than Phe. In some cases, X is Ala;

[0386] PAGLLDLRQG MFAQLVAQNV LLIGGPLSWY SDPGLAGVSL TGGLSYKEDT KELVVAKAGV YYVFFQXELR RVVAGEGSGS VSLALHLQPL RSAAGAAALA LTVDLPPASS EARNSAFGFQ GRLLHLSAGQ RLGVHLHTEA RARHAWQLTQ GATVLGLFRV TPEIPAGLPS PRSE (SEQ ID NO:139), where X is any amino acid other than Gln. In some cases, X is Ala;

[0387] PAGLLDLRQG MFAQLVAQNV LLIGGPLSWY SDPGLAGVSL TGGLSYKEDT KELVVAKAGV YYVFFQXELR RVVAGEGSGS VSLALHLQPL RSAAGAAALA LTVDLPPASS EARNSAFGFQ GRLLHLSAGQ RLGVHLHTEA RARHAWQLTQ GATVLGLFRV TPEIPAGLPS PRSE (SEQ ID NO:140), where X is any amino acid other than Leu. In some cases, X is Ala;

[0388] PAGLLDLRQG MFAQLVAQNV LLIGGPLSWY SDPGLAGVSL TGGLSYKEDT KELVVAKAGV YYVFFQLXLR RVVAGEGSGS VSLALHLQPL RSAAGAAALA LTVDLPPASS EARNSAFGFQ GRLLHLSAGQ RLGVHLHTEA RARHAWQLTQ GATVLGLFRV TPEIPAGLPS PRSE (SEQ ID NO:141), where X is any amino acid other than Glu. In some cases, X is Ala;

[0389] PAGLLDLRQG MFAQLVAQNV LLIGGPLSWY SDPGLAGVSL TGGLSYKEDT KELVVAKAGV YYVFFQLEXR RVVAGEGSGS VSLALHLQPL RSAAGAAALA LTVDLPPASS EARNSAFGFQ RLGVHLHTEA RARHAWQLTQ GATVLGLFRV TPEIPAGLPS PRSE (SEQ ID NO:142), where X is any amino acid other than Leu. In some cases, X is Ala;

[0390] PAGLLDLRQG MFAQLVAQNV LLIGGPLSWY SDPGLAGVSL TGGLSYKEDT KELVVAKAGV YYVITQLELX RVVAGEGSGS VSLALHLQPL RSAAGAAALA LTVDLPPASS EARNSAFGFQ GRLLHLSAGQ RLGVHLHTEA RARHAWQLTQ GATVLGLFRV TPEIPAGLPS PRSE (SEQ ID NO:143), where X is any amino acid other than Arg. In some cases, X is Ala;

[0391] PAGLLDLRQG MFAQLVAQNV LLIGGPLSWY SDPGLAGVSL TGGLSYKEDT KELVVAKAGV YYVFFQLELR XVVAGEGSGS VSLALHLQPL RSAAGAAALA LTVDLPPASS EARNSAFGFQ GRLLHLSAGQ RLGVHLHTEA RARHAWQLTQ GATVLGLFRV TPEIPAGLPS PRSE (SEQ ID NO:144), where X is any amino acid other than Arg. In some cases, X is Ala;

[0392] PAGLLDLRQG MFAQLVAQNV LLIGGPLSWY SDPGLAGVSL TGGLSYKEDT KELVVAKAGV YYVFFQLELR RXVAGEGSGS VSLALHLQPL RSAAGAAALA LTVDLPPASS EARNSAFGFQ GRLLHLSAGQ RLGVHLHTEA RARHAWQLTQ GATVLGLFRV TPEIPAGLPS PRSE (SEQ ID NO:145), where X is any amino acid other than Val. In some cases, X is Ala;

[0393] PAGLLDLRQG MFAQLVAQNV LLIGGPLSWY SDPGLAGVSL TGGLSYKEDT KELVVAKAGV YYVFFQLELR RVXAGEGSGS VSLALHLQPL RSAAGAAALA LTVDLPPASS EARNSAFGFQ GRLLHLSAGQ RLGVHLHTEA RARHAWQLTQ GATVLGLFRV TPEIPAGLPS PRSE (SEQ ID NO:146), where X is any amino acid other than Val. In some cases, X is Ala;

[0394] PAGLLDLRQG MFAQLVAQNV LLIGGPLSWY SDPGLAGVSL TGGLSYKEDT KELVVAKAGV YYVFFQLELR RVVAXEGSGS VSLALHLQPL RSAAGAAALA LTVDLPPASS EARNSAFGFQ GRLLHLSAGQ RLGVHLHTEA RARHAWQLTQ GATVLGLFRV TPEIPAGLPS PRSE (SEQ ID NO:147), where X is any amino acid other than Gly. In some cases, X is Ala;

[0395] PAGLLDLRQG MFAQLVAQNV LLIGGPLSWY SDPGLAGVSL. TGGLSYKEDT KELVVAKAGV YYVFFQLELR RVVAGXGSGS VSLALHLQPL RSAAGAAALA LTVDLPPASS EARNSAFGFQ GRLLHLSAGQ RLGVHLHTEA RARHAWQLTQ GATVLGLFRV TPEIPAGLPS PRSE (SEQ ID NO:148), where X is any amino acid other than Glu. In some cases, X is Ala;

[0396] PAGLLDLRQG MFAQLVAQNV LLIGGPLSWY SDPGLAGVSL TGGLSYKEDT KELVVAKAGV YYVFFQLELR RVVAGEXSGS VSLALHLQPL RSAAGAAALA LTVDLPPASS EARNSAFGFQ GRLLHLSAGQ RLGVHLHTEA RARHAWQLTQ GATVLGLFRV TPEIPAGLPS PRSE (SEQ ID NO:149), where X is any amino acid other than Gly. In some cases, X is Ala;

[0397] PAGLLDLRQG MFAQLVAQNV LLIGGPLSWY SDPGLAGVSL TGGLSYKEDT KELVVAKAGV YYVFFQLELR RVVAGEGXGS VSLALHLQPL RSAAGAAALA LTVDLPPASS EARNSAFGFQ GRLLHLSAGQ RLGVHLHTEA RARHAWQLTQ GATVLGLFRV TPEIPAGLPS PRSE (SEQ ID NO:150), where X is any amino acid other than Ser. In some cases. X is Ala;

[0398] PAGLLDLRQG MFAQLVAQNV LLIGGPLSWY SDPGLAGVSL TGGLSYKEDT KELVVAKAGV YYVFFQLELR RVVAGEGSGS VSLALHLQPL RSAAGAAALA LTVXLPPASS EARNSAFGFQ GRLLHLSAGQ RLGVHLHTEA RARHAWQLTQ GATVLGLFRV TPEIPAGLPS PRSE (SEQ ID NO:151), where X is any amino acid other than Asp. In some cases, X is Ala;

[0399] PAGLLDLRQG MFAQLVAQNV LLIGGPLSWY SDPGLAGVSL TGGLSYKEDT KELVVAKAGV YYVFFQLELR RVVAGEGSGS VSLALHLQPL RSAAGAAALA LTVDXPPASS EARNSAFGFQ GRLLHLSAGQ RLGVHLHTEA RARHAWQLTQ GATVLGLFRV TPEIPAGLPS PRSE (SEQ ID NO:152), where X is any amino acid other than Leu. In some cases, X is Ala;

[0400] PAGLLDLRQG MFAQLVAQNV LLIGGPLSWY SDPGLAGVSL. TGGLSYKEDT KELVVAKAGV YYVFFQLELR RVVAGEGSGS VSLALHLQPL RSAAGAAALA LTVDLXPASS EARNSAFGFQ GRLLHLSAGQ RLGVHLHTEA RARHAWQLTQ GATVLGLFRV TPEIPAGLPS PRSE (SEQ ID NO:153), where X is any amino acid other than Pro. In some cases, X is Ala;

[0401] PAGLLDLRQG MFAQLVAQNV LLIGGPLSWY SDPGLAGVSL TGGLSYKEDT KELVVAKAGV YYVFFQLELR RVVAGEGSGS VSLALHLQPL RSAAGAAALA LTVDLPPAXS EARNSAFGFQ GRLLHLSAGQ RLGVHLHTEA RARHAWQLTQ GATVLGLFRV TPEIPAGLPS PRSE (SEQ ID NO:154), where X is any amino acid other than Ser. In some cases. X is Ala;

[0402] PAGLLDLRQG MFAQLVAQNV LLIGGPLSWY SDPGLAGVSL TGGLSYKEDT KELVVAKAGV YYVFFQLELR RVVAGEGSGS VSLALHLQPL RSAAGAAALA LTVDLPPASX EARNSAFGFQ GRLLHLSAGQ RLGVHLHTEA RARHAWQLTQ GATVLGLFRV TPEIPAGLPS PRSE (SEQ ID NO:155), where X is any amino acid other than Scr. In some cases, X is Ala;

[0403] PAGLLDLRQG MFAQLVAQNV LLIGGPLSWY SDPGLAGVSL TGGLSYKEDT KELVVAKAGV YYVITQLELR RVVAGEGSGS VSLALHLQPL RSAAGAAALA LTVDLPPASS XARNSAFGFQ GRLLHLSAGQ RLGVHLHTEA RARHAWQLTQ GATVLGLFRV TPEIPAGLPS PRSE (SEQ ID NO:156), where X is any amino acid other than Glu. In some cases, X is Ala;

[0404] PAGLLDLRQG MFAQLVAQNV LLIGGPLSWY SDPGLAGVSL TGGLSYKEDT KELVVAKAGV YYVFFQLELR RVVAGEGSGS VSLALHLQPL RSAAGAAALA LTVDLPPASS EAXNSAFGFQ GRLLHLSAGQ RLGVHLHTEA RARHAWQLTQ GATVLGLFRV TPEIPAGLPS PRSE (SEQ ID NO:157), where X is any amino acid other than Arg. In some cases, X is Ala;

[0405] PAGLLDLRQG MFAQLVAQNV LLIGGPLSWY SDPGLAGVSL TGGLSYKEDT KELVVAKAGV YYVFFQLELR RVVAGEGSGS VSLALHLQPL RSAAGAAALA LTVDLPPASS EARXSAFGFQ GRLLHLSAGQ RLGVHLHTEA RARHAWQLTQ GATVLGLFRV TPEIPAGLPS PRSE (SEQ ID NO:158), where X is any amino acid other than Asn. In some cases, X is Ala;

[0406] PAGLLDLRQG MFAQLVAQNV LLIGGPLSWY SDPGLAGVSL TGGLSYKEDT KELVVAKAGV YYVFFQLELR RVVAGEGSGS VSLALHLQPL RSAAGAAALA LTVDLPPASS EARNXAFGFQ GRLLHLSAGQ RLGVHLHTEA RARHAWQLTQ GATVLGLFRV TPEIPAGLPS PRSE (SEQ ID NO:159), where X is any amino acid other than Ser. In some cases. X is Ala;

[0407] PAGLLDLRQG MFAQLVAQNV LLIGGPLSWY SDPGLAGVSL TGGLSYKEDT KELVVAKAGV YYVFFQLELR RVVAGEGSGS VSLALHLQPL RSAAGAAALA LTVDLPPASS EARNSAXGFQ GRLLHLSAGQ RLGVHLHTEA RARHAWQLTQ GATVLGLFRV TPEIPAGLPS PRSE (SEQ ID NO:160), where X is any amino acid other than Phe. In some cases, X is Ala;

[0408] PAGLLDLRQG MFAQLVAQNV LLIGGPLSWY SDPGLAGVSL TGGLSYKEDT KELVVAKAGV YYVFFQLELR RVVAGEGSGS VSLALHLQPL RSAAGAAALA LTVDLPPASS EARNSAFGFQ GRLLHLSAGX RLGVHLHTEA RARHAWQLTQ GATVLGLFRV TPEIPAGLPS PRSE (SEQ ID NO:161), where X is any amino acid other than Gin. In some cases, X is Ala;

[0409] PAGLLDLRQG MFAQLVAQNV LLIGGPLSWY SDPGLAGVSL TGGLSYKEDT KELVVAKAGV YYVFFQLELR RVVAGEGSGS VSLALHLQPL RSAAGAAALA LTVDLPPASS EARNSAFGFQ GRLLHLSAGQ XLGVHLHTEA RARHAWQLTQ GATVLGLFRV TPEIPAGLPS PRSE (SEQ ID NO:162), where X is any amino acid other than Arg. In some cases, X is Ala;

[0410] PAGLLDLRQG MFAQLVAQNV LLIGGPLSWY SDPGLAGVSL TGGLSYKEDT KELVVAKAGV YYVFFQLELR RVVAGEGSGS VSLALHLQPL RSAAGAAALA LTVDLPPASS EARNSAFGFQ GRLLHLSAGQ RXGVHLHTEA RARHAWQLTQ GATVLGLFRV TPEIPAGLPS PRSE (SEQ ID NO:163), where X is any amino acid other than Len. In some cases, X is Ala;

[0411] PAGLLDLRQG MFAQLVAQNV LLIGGPLSWY SDPGLAGVSL TGGLSYKEDT KELVVAKAGV YYVFFQLELR RVVAGEGSGS VSLALHLQPL RSAAGAAALA LTVDLPPASS EARNSAFGFQ GRLLHLSAGQ RLXVHLHTEA RARHAWQLTQ GATVLGLFRV TPEIPAGLPS PRSE (SEQ ID NO:164), where X is any amino acid other than Gly. In some cases, X is Ala;

[0412] PAGLLDLRQG MFAQLVAQNV LLIGGPLSWY SDPGLAGVSL TGGLSYKEDT KELVVAKAGV YYVFFQLELR RVVAGEGSGS VSLALHLQPL RSAAGAAALA LTVDLPPASS EARNSAFGFQ GRLLHLSAGQ RLGXHLHTEA RARHAWQLTQ GATVLGLFRV TPEIPAGLPS PRSE (SEQ ID NO:165), where X is any amino acid other than Val. In some cases, X is Ala;

[0413] PAGLLDLRQG MFAQLVAQNV LLIGGPLSWY SDPGLAGVSL TGGLSYKEDT KELVVAKAGV YYVFFQLELR RVVAGEGSGS VSLALHLQPL RSAAGAAALA LTVDLPPASS EARNSAFGFQ GRLLHLSAGQ RLGVXLHTEA RARHAWQLTQ GATVLGLFRV TPEIPAGLPS PRSE (SEQ ID NO:166), where X is any amino acid other than His. In some cases, X is Ala;

[0414] PAGLLDLRQG MFAQLVAQNV LLIGGPLSWY SDPGLAGVSL TGGLSYKEDT KELVVAKAGV YYVFFQLELR RVVAGEGSGS VSLALHLQPL RSAAGAAALA LTVDLPPASS EARNSAFGFQ GRLLHLSAGQ RLGVHXHTEA RARHAWQLTQ GATVLGLFRV TPEIPAGLPS PRSE (SEQ ID NO:167), where X is any amino acid other than Leu. In some cases, X is Ala;

[0415] PAGLLDLRQG MFAQLVAQNV LLIGGPLSWY SDPGLAGVSL TGGLSYKEDT KELVVAKAGV YYVFFQLELR RVVAGEGSGS VSLALHLQPL RSAAGAAALA LTVDLPPASS EARNSAFGFQ GRLLHLSAGQ RLGVHLXTEA RARHAWQLTQ GATVLGLFRV TPEIPAGLPS PRSE (SEQ ID NO:168), where X is any amino acid other than His. In some cases, X is Ala;

[0416] PAGLLDLRQG MFAQLVAQNCV LLIGGPLSWY SDPGLAGVSL. TGGLSYKEDT KELVVAKAGV YYVFFQLELR RVVAGEGSGS VSLALHLQPL RSAAGAAALA LTVDLPPASS EARNSAFGFQ GRLLHLSAGQ RLGVHLHXEA RARHAWQLTQ GATVLGLFRV TPEIPAGLPS PRSE (SEQ ID NO:169), where X is any amino acid other than Thr. In some cases, X is Ala;

[0417] PAGLLDLRQG MFAQLVAQNV LLIGGPLSWY SDPGLAGVSL TGGLSYKEDT KELVVAKAGV YYVFFQLELR RVVAGEGSGS VSLALHLQPL RSAAGAAALA LTVDLPPASS EARNSAFGFQ GRLLHLSAGQ RLGVHLIITXA RARHAWQLTQ GATVLGLFRV TPEIPAGLPS PRSE (SEQ ID NO:170), where X is any amino acid other than Glu. In some cases, X is Ala;

[0418] PAGLLDLRQG MFAQLVAQNV LLIGGPLSWY SDPGLAGVSL TGGLSYKEDT KELVVAKAGV YYVFFQLELR RVVAGEGSGS VSLALHLQPL RSAAGAAALA LTVDLPPASS EARNSAFGFQ GRLLHLSAGQ RLGVHLHTEA XARHAWQLTQ GATVLGLFRV TPEIPAGLPS PRSE (SEQ ID NO:171), where X is any amino acid other than Arg. In some cases, X is Ala;

[0419] PAGLLDLRQG MFAQLVAQNV LLIGGPLSWY SDPGLAGVSL TGGLSYKEDT KELVVAKAGV YYVFFQLELR RVVAGEGSGS VSLALHLQPL RSAAGAAALA LTVDLPPASS EARNSAFGFQ GRLLHLSAGQ RLGVHLHTEA RAXHAWQLTQ GATVLGLFRV TPEIPAGLPS PRSE (SEQ ID NO:172), where X is any amino acid other than Arg. In some cases, X is Ala;

[0420] PAGLLDLRQG MFAQLVAQNV LLIGGPLSWY SDPGLAGVSL TGGLSYKEDT KELVVAKAGV YYVITQLELR RVVAGEGSGS VSLALHLQPL RSAAGAAALA LTVDLPPASS EARNSAFGFQ GRLLHLSAGQ RLGVHLHTEA RARXAWQLTQ GATVLGLFRV TPEIPAGLPS PRSE (SEQ ID NO:173), where X is any amino acid other than his. In some cases, X is Ala;

[0421] PAGLLDLRQG MFAQLVAQNV LLIGGPLSWY SDPGLAGVSL TGGLSYKEDT KELVVAKAGV YYVFFQLELR RVVAGEGSGS VSLALHLQPL RSAAGAAALA LTVDLPPASS EARNSAFGFQ GRLLHLSAGQ RLGVHLHTEA RARHAXQLTQ GATVLGLFRV TPEIPAGLPS PRSE (SEQ ID NO:174), where X is any amino acid other than Tip. In some cases, X is Ala;

[0422] PAGLLDLRQG MFAQLVAQNV LLIGGPLSWY SDPGLAGVSL TGGLSYKEDT KELVVAKAGV YYVFFQLELR RVVAGEGSGS VSLALHLQPL RSAAGAAALA LTVDLPPASS EARNSAFGFQ GRLLHLSAGQ RLGVHLHTEA RARHAWQXTQ GATVLGLFRV TPEIPAGLPS PRSE (SEQ ID NO:175), where X is any amino acid other than Leu. In some cases, X is Ala;

[0423] PAGLLDLRQG MFAQLVAQNV LLIGGPLSWY SDPGLAGVSL TGGLSYKEDT KELVVAKAGV YYVFFQLELR RVVAGEGSGS VSLALHLQPL RSAAGAAALA LTVDLPPASS EARNSAFGFQ GRLLHLSAGQ RLGVHLHTEA RARHAWQLXQ GATVLGLFRV TPEIPAGLPS PRSE (SEQ ID NO:176), where X is any amino acid other than Thr. In some cases, X is Ala;

[0424] PAGLLDLRQG MFAQLVAQNV LLIGGPLSWY SDPGLAGVSL. TGGLSYKEDT KELVVAKAGV YYVFFQLELR RVVAGEGSGS VSLALHLQPL RSAAGAAALA LTVDLPPASS EARNSAFGFQ GRLLHLSAGQ RLGVHLHTEA RARHAWQLTX GATVLGLFRV TPEIPAGLPS PRSE (SEQ ID NO:177), where X is any amino acid other than Gln. In some cases, X is Ala;

[0425] PAGLLDLRQG MFAQLVAQNV LLIGGPLSWY SDPGLAGVSL TGGLSYKEDT KELVVAKAGV YYVFFQLELR RVVAGEGSGS VSLALHLQPL RSAAGAAALA LTVDLPPASS EARNSAFGFQ GRLLHLSAGQ RLGVHLHTEA RARHAWQLTQ XATVLGLFRV TPEIPAGLPS PRSE (SEQ ID NO:178), where X is any amino acid other than Gly. In some cases, X is Ala;

[0426] PAGLLDLRQG MFAQLVAQNV LLIGGPLSWY SDPGLAGVSL TGGLSYKEDT KELVVAKAGV YYVITQLELR RVVAGEGSGS VSLALHLQPL RSAAGAAALA LTVDLPPASS EARNSAFGFQ GRLLHLSAGQ RLGVHLHTEA RARHAWQLTQ GAXVLGLFRV TPEIPAGLPS PRSE (SEQ ID NO:179), where X is any amino acid other than Thr. In some cases, X is Ala; and

[0427] PAGLLDLRQG MFAQLVAQNV LLIGGPLSWY SDPGLAGVSL TGGLSYKEDT KELVVAKAGV YYVFFQLELR RVVAGEGSGS VSLALHLQPL RSAAGAAALA LTVDLPPASS EARNSAFGFQ GRLLHLSAGQ RLGVHLHTEA RARHAWQLTQ GATXLGLFRV TPEIPAGLPS PRSE (SEQ ID NO:180), where X is any amino acid other than Val. In some cases, X is Ala.

### IL-2 Variants

[0428] In some cases, a variant immunomodulatory polypeptide present in a TMMP of the present disclosure is a variant IL-2 polypeptide. Wild-type IL-2 binds to IL-2 receptor (IL-2R), i.e., a heterotrimeric polypeptide comprising IL-2Ra, IL: 2R13, and IL-2Ry.

[0429] A wild-type IL-2 amino acid sequence can be as follows: APTSSSTKKT QLQLEHLLLD LQMILNGINN YKNPKLTRML TFKFYMPKKA TELKELQCLEEELKPLEEVL NLAQSKNFHL RPRDLISNIN VIVLELKGSE TTFMCEYADE TATIVEFLNRWITFCQSIIS TLT (SEQ ID NO:15).

[0430] Wild-type IL2 binds to an IL2 receptor (IL2R) on the surface of a cell. An IL2 receptor is in some cases a heterotrimeric polypeptide comprising an alpha chain (IL-2Rα; also referred to as CD25), a beta chain (IL-2Rβ; also referred to as CD122: and a gamma chain (IL-2Rγ; also referred to as CD132). Amino acid sequences of human IL-2Rα, IL2β, and IL-2Rγ can be as follows.

[0431] Human IL-2Rα: ELCDDDPPE IPHATFKAMA YKEGTMLNCE CKRGERRIKS GSLYMLCTGN SSHSSWDNQC QCTSSATRNT TKQVTPQPEE QKERKTTEMQ SPMQPVDQAS LPGHCREPPP WENEATERIY IIFVVGQMVYY QCVQGYRALH RGPAESVCKM THGKTRWTQP QLICTGEMET SQFPGEEKPQ ASPEGRPESE TSCLVTTTDF QIQTEMAATM ETSIFTTFYQ VAVAGCVFLL ISVLLLSGLT WQRRQRKSRR TI (SEQ ID NO:16).

[0432] Human IL-2Rβ: VNG TSQFTCFYNS RANISCVWSQ DGALQDTSCQ VHAWPDRRRW NQTCELLPVS QASWACNLIL GAPDSQKLTT VDIVTLRVLC REGVRWRVMA IQDFKPFENL RLMAPISLQV VHVETHRCNI SWEISQASHY FERHLEFEAR TLSPGHTWEE APLLTLKQKQ EWICLETLTP DTQYEFQVRV KPLQGEFTTW SPWSQPLAFR TKPAALGKDT IPWLGHLLVG LSGAFGFIIL VYLLINCRNT GPWLKKVLKC NTPDPSKFFS QLSSEHGGDV QKWLSSPFPS SSFSPGGLAP ELSPLEVLER DKVTQLLLQQ DKVPEPASLS SNHSLTSCFT NQGYFFEHLP DALEIEACQV YFTYDPYSEE DPDEGVAGAP TGSSPQPLQP LSGEDDAYCT FPSRDDLLLF SPSLLGGPSP PSTAPGGSGA GEERMPPSLQ ERVPRDWDPQ PLGPFTPGVP DLVDFQPPPE LVLREAGEEV PDAGPREGVS FPWSRPPGQG EFRALNARLP LNTDAYLSLQ ELQGQDPTHL V (SEQ ID NO:17).

[0433] Human IL-2Rγ: LNTTILTP NGNEDTTADF FLTTMPTDSL SVSTLPLPEV QCFVFNVEYM NCTWNSSSEP QPTNLTLUIYW YKNSDNDKVQ KCSHYLFSEE ITSGCQLQKK EIHLYQTFVV QLQDPREPRR QATQMLKLQN LVIPWAPENL TLHKLSESQL ELNWNNRFLN HCLEHLVQYR TDWDHSWTEQ SVDYRIIKESL PSVDGQKRYT FRVRSRFNPL CGSAQIIWSEW SHPIHWGSNT SKENPFLFAL EAVVISVGSM GLIISLLCVY FWLERTMPRI PTLKNLEDLV TEYHGNFSAW SGVSKGLAES LQPDYSERLC LVSEIPPKGG ALGEGPGASP CNQHSPYWAP PCYTLKPET (SEQ ID NO:18).

[0434] In some cases, where a TMMP of the present disclosure comprises a variant IL-2 polypeptide, a “cognate co-immunomodulatory polypeptide” is an IL-2R comprising polypeptides comprising the amino acid sequences of SEQ ID NO:16, 17, and 18.

[0435] In some cases, a variant IL-2 polypeptide exhibits reduced binding affinity to IL-2R, compared to the binding affinity of a IL-2 polypeptide comprising the amino acid sequence set forth in SEQ ID NO:15. For example, in some cases, a variant IL-2 polypeptide binds IL-2R with a binding affinity that is at least 10% less, at least 15% less, at least 20% less, at least 25%, at least 30% less, at least 35% less, at least 40% less, at least 45% less, at least 50% less, at least 55% less, at least 60% less, at least 65% less, at least 70% less, at least 75% less, at least 80% less, at least 85% less, at least 90% less, at least 95% less, or more than 95% less, than the binding affinity of an IL-2 polypeptide comprising the amino acid sequence set forth in SEQ ID NO:15 for an IL-2R (e.g., an IL-2R comprising polypeptides comprising the amino acid sequence set forth in SEQ ID NOs:16-18), when assayed under the same conditions.

[0436] In some cases, a variant IL-2 polypeptide has a binding affinity to IL-2R that is from 100 nM to 100 μM. As another example, in some cases, a variant IL-2 polypeptide has a binding affinity for IL-2R (e.g., an IL-2R comprising polypeptides comprising the amino acid sequence set forth in SEQ ID NOs:16-18) that is from about 100 nM to 150 nM, from about 150 nM to about 200 nM, from about 200 nM to about 250 nM, from about 250 nM to about 300 nM, from about 300 nM to about 350 nM, from about 350 nM to about 400 nM, from about 400 nM to about 500 nM, from about 500 nM to about 600 nM, from about 600 nM to about 700 nM, from about 700 nM to about 800 nM, from about 800 nM to about 900 nM, from about 900 nM to about 1μM, to about 1 μM to about 5 μM, from about 5 μM to about 10 μM, from about 10 pit to about 15 μM, from about 15 μM to about 20 μM, from about 20 μM to about 25 μM, from about 25 μM to about 50 μM, from about 50 μM to about 75 μM, or from about 75 μM to about 100 μM.

[0437] In some cases, a variant IL-2 polypeptide has a single amino acid substitution compared to the IL-2 amino acid sequence set forth in SEQ ID NO:15. In some cases, a variant IL-2 polypeptide has from 2 to 10 amino acid substitutions compared to the IL-2 amino acid sequence set forth in SEQ ID NO:15. In some cases, a variant IL-2 polypeptide has 2 amino acid substitutions compared to the IL-2 amino acid sequence set forth in SEQ ID NO:15. In some cases, a variant IL-2 polypeptide has 3 amino acid substitutions compared to the IL-2 amino acid sequence set forth in SEQ ID NO:15. In some cases, a variant IL-2 polypeptide has 4 amino acid substitutions compared to the IL-2 amino acid sequence set forth in SEQ ID NO:15. In some cases, a variant IL-2 polypeptide has 5 amino acid substitutions compared to the IL-2 amino acid sequence set forth in SEQ ID NO:15. In some cases, a variant IL-2 polypeptide has 6 amino acid substitutions compared to the IL-2 amino acid sequence set forth in SEQ ID NO:15. In some cases, a variant IL-2 polypeptide has 7 amino acid substitutions compared to the IL-2 amino acid sequence set forth in SEQ ID NO:15. In some cases, a variant IL-2 polypeptide has 8 amino acid substitutions compared to the IL-2 amino acid sequence set forth in SEQ ID NO:15. In some cases, a variant IL-2 polypeptide has 9 amino acid substitutions compared to the IL-2 amino acid sequence set forth in SEQ ID NO:15. In some cases, a variant IL-2 polypeptide has 10 amino acid substitutions compared to the IL-2 amino acid sequence set forth in SEQ ID NO:15.

[0438] Suitable IL-2 variants include a polypeptide that comprises an amino acid sequence having at least 90%, at least 95%, at least 98%, at least 99%, or 100%, amino acid sequence identity to any one of the following amino acid sequences:

[0439] APTSSSTKKT QLQLEHLLLD LQMILNGINN YKNPKLTRML TXKFYMPKKA TELKHLQCLE EELKPLEEVL NLAQSKNFHL RPRDLISNIN VIVLELKGSE TTFMCEYADE TATIVEFLNR WITFCQSTTS (SEQ ID NO:181), where X is any amino acid other than Phe. In some cases, X is Ala. In some cases, X is Met. In some cases, X is Pro. In some cases, X is Ser. In some cases, X is Thr. In some cases, X is Trp. In some cases, X is Tyr. In some cases, X is Val. In some cases. X is His;

[0440] APTSSSTKKT QLQLEHLLLX LQMILNGINN YKNPKLTRML TFKFYMPKKA TELKHLQCLE EELKPLEEVL NLAQSKNFHL RPRDLISNIN VIVLELKGSE TTFMCEYADE TATIVEFLNR WITFCQSIIS TLT (SEQ ID NO:182), where X is any amino acid other than Asp. In some cases, X is Ala;

[0441] APTSSSTKKT QLQLXHLLLD LQMILNCINN YKNPKLTRML TFKFYMPKKA TELKHLQCLE EELKPLEEVL NLAQSKNFHL RPRDLISNIN VIVLELKGSE TTFMCEYADE TATIVEFLNR WITFCQSITS TLT (SEQ ID NO:183), where X is any amino acid other than Glu. In some cases, X is Ala.

[0442] APTSSSTKKT QLQLEXLLLD LQMILNGINN YKNPKLTRML TFKFYMPKKA TELKHLQCLE EELKPLEEVL NLAQSKNFHL RPRDLISNIN VIVLELKGSE TTFMCEYADE TATIVEFLNR WITFCQSIIS TLT (SEQ ID NO:184), where X is any amino acid other than His. In some cases, X is Ala. In some cases, X is Thr. In some cases, X is Asn. In some cases, X is Cys. In some cases, X is Gln. In some cases, X is Met. In some cases, X is Val. In some cases, X is Trp;

[0443] APTSSSTKKT QLQLEXLLLD LQMILNGINN YKNPKLTRML TFKFYMPKKA TELKHLQCLE EELKPLEEVL NLAQSKNFHL RPRDLISNIN VIVLELKGSE TTFMCEYADE TATIVEFLNR WITFCQSIIS TLT (SEQ ID NO:185), where X is any amino acid other than His. In some cases, X is Ala. In some cases, X is Arg. In some cases, X is Asn. In some cases, X is Asp. In some cases, X is Cys. In some cases, X is Glu. In some cases, X is Gln. In some cases, X is Gly. In some cases, X is Ile. In some cases, X is Lys. In some cases, X is Len. In some cases, X is Met. In some cases, X is Phe. In some cases, X is Pro. In some cases, X is Ser. In some cases, X is Thr. In some cases, X is Tyr. In some cases, X is Trp. In some cases, X is Val;

[0444] APTSSSTKKT QLQLEHLLLD LQMILNGINN YKNPKLTRML TFKFXMPKKA TELKHLQCLE EELKPLEEVL NLAQSKNFHL RPRDLISNIN VIVLELKGSE TTFMCEYADE TATIVEFLNR WITFCQSIIS TLT (SEQ ID NO:186), where X is any amino acid other than Tyr. In some cases, X is Ala;

[0445] APTSSSTKKT QLQLEHLLLD LQMILNGINN YKNPKLTRML, TFKFYMPKKA TELKHLQCLE EELKPLEEVL NLAQSKNFHL RPRDLISNIN VIVLELKGSE TTFMCEYADE TATIVEFLNR WITFCXSISS TLT (SEQ ID NO:187), where X is any amino acid other than Gln. In some cases, X is Ala;

[0446] APTSSSTKKT QLQLEX₁LLLD LQMILNGINN YKNPKLTRML TX₂KFYMPKKA TELKHLQCLE EELKPLEEVL NLAQSKNFHL RPRDLISNIN VIVLELKGSE TTFMCEYADE TATIVEFLNR WITFCQSIIS TLT (SEQ. ID NO:188), where X₁ is any amino acid other than Ills, and where X₂ is any amino acid other than Phe. In some cases, X₁ is Ala. In some cases, X₂ is Ala. In some cases, X₁ is Ala; and X₂ is Ala. In some cases, X₁ is Thr; and X₂ is Ala;

[0447] APTSSSTKKT QLQLEHLLLX₁LQMILNGINN YKNPKLTRML TX₂KFYMPKKA TELKHLQCLE EELKPLEEVL NLAQSKNFHL RPRDLISNIN VIVLELKGSE TTFMCEYADE TATIVEFLNR WITFCQSIIS TLT (SEQ ID NO:189), where X₁ is any amino acid other than Asp; and where X₂ is any amino acid other than Phe. In some cases, X₁ is Ala. In some cases, X₂ is Ala. In some cases, X₁ is Ala; and X₂ is Ala;

[0448] APTSSSTKKT QLQLX₁HLLLX₂ LQMILNGINN YKNPKLTRML TX₃KEYMPKKA TELKHLQCLE EELKPLEEVL NLAQSKNFHL RPRDLISNIN VIVLELKGSE TTFMCEYADE TATIVEFLNR WITFCQSIIS TLT (SEQ ID NO:190), where X₁ is any amino acid other than Glu; where X₂ is any amino acid other than Asp; and where X₃ is any amino acid other than Phe. In some cases, X₁ is Ala. In some cases. X₂ is Ala. In some cases, X₃ is Ala. In some cases. X₁ is Ala; X₂ is Ala; and X₃ is Ala;

[0449] APTSSSTKKT QLQLEX₁LLLX₂ LQMILNGINN YKNPKLTRML TX₃KFYMPKKA TELKHLQCLE EELKPLEEVL NLAQSKNFHL RPRDLISNIN VIVLELKGSE TTFMCEYADE TATIVEFLNR WITFCQSIIS TLT (SEQ ID NO:191), where X₁ is any amino acid other than His; where X₂ is any amino acid other than Asp; and where X₃ is any amino acid other than Phe. In some cases, X₁ is Ala. In some cases, X₂ is Ala. In some cases, X₃ is Ala. In some cases. X₁ is Ala; X₂ is Ala; and X₁ is Ala;

[0450] APTSSSTKKT QLQLEHLLLX₁ LQMILNGINN YKNPKLTRML TX₂KFYMPKKA TELKHLQCLE EELKPLEEVL NLAQSKNFHL RPRDLISNIN VIVLELKGSE TTFMCEYADE TATIVEFLNR WITFCX₃SIIS TLT (SEQ ID NO:192), where X is any amino acid other than Asp; where X₂ is any amino acid other than Phe; and where X₃ is any amino acid other than Gln. In some cases, X₁ is Ala. In some cases, X₂ is Ala. In some cases, X₃ is Ala. In some cases, X₁ is Ala; X₂ is Ala; and X₃ is Ala;

[0451] APTSSSTKKT QLQLEHLLLX₁ LQMILNGINN YKNPKLTRML TX₂KFX₃MPKKA TELKHLQCLE EELKPLEEVL NLAQSKNFHL RPRDLISNIN VIVLELKGSE TTFMCEYADE TATIVEFLNR WITFCQSIIS TLT (SEQ ID NO:193), where X₁ is any amino acid other than Asp; where X₂ is any amino acid other than Phe; and where X is any amino acid other than Tyr. In some cases, X₁ is Ala. In some cases, X₂ is Ala. In some cases, X₃ is Ala. In some cases. X₁ is Ala; X₂ is Ala; and X₃ is Ala;

[0452] APTSSSTKKT QLQLEX₁LLLX₂ LQMILNGINN YKNPKLTRML TX₃KFX₄MPKKA TELKHLQCLE EELKPLEEVL NLAQSKNFHL RPRDLISNIN VIVLELKGSE TTFMCEYADE TATIVEFLNR WITFCQSIIS TLT (SEQ ID NO:194), where X₁ is any amino acid other than His; where X₂ is any amino acid other than Asp; where X₃ is any amino acid other than Phe; and where X₄ is any amino acid other than Tyr. In some cases, X₁ is Ala. In some cases, X₂ is Ala. In some cases, X₃ is Ala. In some cases, X₄ is Ala. In some cases, X₁ is Ala; X₂ is Ala; X₃ is Ala; and X₄ is Ala;

[0453] APTSSSTKKT QLQLEHLLLX₁ LQMILNGINN YKNPKLTRML TX₂KFX₃MPKKA TELKHLQCLE EELKPLEEVL NLAQSKNFHL RPRDLISNIN VIVLELKGSE TTFMCEYADE TATIVEFLNR WITFCX₄SIIS TLT (SEQ ID NO:195), where X₁ is any amino acid other than Asp; where X₂ is any amino acid other than Phe; where X₃ is any amino acid other than Tyr; and where X₄ is any amino acid other than Gln. In some cases, X₁ is Ala. In some cases, X₂ is Ala. In some cases, X₃ is Ala. In some cases, X₄ is Ala. In some cases, X₁ is Ala; X₂ is Ala; X₃ is Ala; and X₄ is Ala;

[0454] APTSSSTKKT QLQLEX₁LLLX₂ LQMILNGINN YKNPKLTRML TX₃KFX₄MPKKA TELKHLQCLE EELKPLEEVL NLAQSKNFHL RPRDLISNIN VIVLELKGSE TTFMCEYADE TATIVEFLNR WITFCX₅SIIS TLT (SEQ ID NO:196), where X₁ is any amino acid other than His; where X₂ is any amino acid other than Asp; where X₃ is any amino acid other than Phe; where X₄ is any amino acid other than Tyr; and where X₁ is any amino acid other than Gln. In some cases, X₁ is Ala. In some cases, X₂ is Ala. In some cases, X₃ is Ala. In some cases, X₄ is Ala. In some cases, X₅ is Ala. In some cases, X₁ is Ala; X₂ is Ala; X₃ is Ala; X₄ is Ala; X₅ is Ala; and

[0455] APTSSSTKKT QLQLEX₁LLLD LQMILNGINN YKNPKLTRML TX₂KFYMPKKA TELKHLQCLE EELKPLEEVL NLAQSKNFHL RPRDLISNIN VIVLELKGSE TTFMCEYADE TATIVEFLNR WITFCX₃SIIS TLT (SEQ ID NO:197), where X₁ is any amino acid other than His; where X₂ is any amino acid other than Phe; and where X₃ is any amino acid other than Gln. In some cases, X₁ is Ala. In some cases, X₂ is Ala. In some cases, X₃ is Ala. In some cases, X₁ is Ala; X₂ is Ala; and X₃ is Ala.

### Additional Polypeptides

[0456] A polypeptide chain of a TMMP of the present disclosure can include one or more polypeptides in addition to those described above. Suitable additional polypeptides include epitope tags and affinity domains. The one or more additional polypeptide can be included at the N-terminus of a polypeptide chain of a TMMP, at the C-terminus of a polypeptide chain of a TMMP, or internally within a polypeptide chain of a TMMP.

### Epitope Tag

[0457] Suitable epitope tags include, hut are not limited to, hemagglutinin (HA; e.g., YPYDVPDYA (SEQ ID NO:271); FLAG (e.g., DYKDDDDK (SEQ ID NO:272); c-myc (e.g., EQKLISEEDL; SEQ ID NO:273), and the like.

### Affinity Domain

[0458] Affinity domains include peptide sequences that can interact with a binding partner, e.g., such as one immobilized on a solid support, useful for identification or purification. DNA sequences encoding multiple consecutive single amino acids, such as histidine, when fused to the expressed protein, may be used for one-step purification of the recombinant protein by high affinity binding to a resin column, such as nickel sepharose. Exemplary affinity domains include His5 (HHHHH) (SEQ ID NO:271), HisX6 (HHHHHH) (SEQ ID NO:275), C-myc (EQKLISEEDL) (SEQ ID NO:276), Flag (DYKDDDDK) (SEQ ID NO:277), StrepTag (WSHPQFEK) (SEQ ID NO:278), hemagglutinin, e.g., HA Tag (YPYDVPDYA) (SEQ ID NO:279), glutathione-S-transferase (GST), thioredoxin, cellulose binding domain, RYIRS (SEQ ID NO:280), Phe-His-His-Thr (SEQ ID NO:281), chitin binding domain, S-peptide, T7 peptide, SH2 domain, C-end RNA tag, WEAAAREACCRECCARA (SEQ ID NO:282), metal binding domains. e.g., zinc binding domains or calcium binding domains such as those from calcium-binding proteins, e.g., calmodulin, troponin C, calcineurin B, myosin light chain, recoverin, S-modulin, visinin, VILIP, neurocalcin, hippocalcin, frequenin, caltractin, calpain large-subunit, 5100 proteins, parvalbumin, calbindin D9K, calbindin D28K, and calretinin, inteins, biotin, streptavidin, MyoD, Id, leucine zipper sequences, and maltose binding protein.

### Drug Conjugates

[0459] A polypeptide chain of a TMMP of the present disclosure can comprise a small molecule drug linked (e.g., covalently attached) to the polypeptide chain. For example, where a TMMP of the present disclosure comprises an Fe polypeptide, the Fc polypeptide can comprise a covalently linked small molecule drug. In some cases, the small molecule drug is a cancer chemotherapeutic agent, e.g., a cytotoxic agent. A polypeptide chain of a TMMP of the present disclosure can comprise a cytotoxic agent linked (e.g., covalently attached) to the polypeptide chain. For example, where a TMMP of the present disclosure comprises an Fe polypeptide, the Fe polypeptide can comprise a covalently linked cytotoxic agent. Cytotoxic agents include prodrugs.

[0460] A drug (e.g., a cancer chemotherapeutic agent) can be linked directly or indirectly to a polypeptide chain of a TMMP of the present disclosure. For example, where a TMMP of the present disclosure comprises an Fc polypeptide, a drug (e.g., a cancer chemotherapeutic agent) can be linked directly or indirectly to the Fc polypeptide. Direct linkage can involve linkage directly to an amino acid side chain. Indirect linkage can be linkage via a linker. A drug (e.g., a cancer chemotherapeutic agent) can be linked to a polypeptide chain (e.g., an Fe polypeptide) of a TMMP of the present disclosure via a thioether bond, an amide bond, a carbamate bond, a disulfide bond, or an ether bond.

[0461] Linkers include cleavable linkers and non-cleavable linkers. In some cases, the linker is a protease-cleavable linker. Suitable linkers include, e.g., peptides (e.g., from 2 to 10 amino acids in length: e.g., 2, 3, 4, 5, 6, 7, 8, 9, or 10 amino acids in length), alkyl chains, poly(ethylene glycol), disulfide groups, thioether groups, acid labile groups, photolabile groups, peptidase labile groups, and esterase labile groups. Non-limiting example of suitable linkers are: i) N-succinimidyl-[(N-maleimidopropionamido)-tetracthyleneglycol]ester (NHS-PEG4-maleimide); ii) N-succinimidyl 4-(2-pyridyldithio)butanoate (SPDB); N-succinimidyl 4-(2-pyridyldithio)2-sulfohutanoate (sulfo-SPDB); N-succinimidyl 4-(2-pyridyldithio) pentanoate (SPP); N-succinimidyl-4-(N-maleimidomethyl)-cyclohexane-1-carboxy-(6-amidocaproate) (LC-SMCC); κ-maleimidoundecanoic acid N-succinimidyl, ester (KMUA); γ-maleimide butyric acid N-succinimidyl ester (GMBS); ε-maleimidocaproic acid N-hydroxysuccinimide ester (FMCS); m-maleimide benzoyl-N-hydroxysuccinimide ester (MBS); N-(α-maleimidoacetoxy)-succinimide ester (AMAS); succinimidyl-6-((3-maleimidopropionamide)hexanoate (SMPH); N-succinimidyl 4-(p-maleimidophenyl)butyrate (SMPB); N-(p-maleimidophenyl)isocyanate (PMPI); N-succinimidyl 4(2-pyridylthio)pentanoate (SPP); N-succinimidyl(4-iodo-acetyl)aminobenzoate (SIAB); 6-maleimidocaproyl (MC); maleimidopropanoyl (MP); p-aminobenzyloxycarbonyl (PAB); N-succinimidyl 4-(maleimidomethyl)cyclohexanecarboxylate (SMCC); N-succinimidyl-4-(N-maleimidomethyl)-cyclohexane-1-carboxy-(6-amidocaproate), a “long chain” analog of SMCC (LC-SMCC); 3-maleimidopropanoic acid N-succinimidyl ester (BMPS); N-succinimidyl iodoacetate (SIA); N-succinimidyl bromoacetate (SBA); and N-succinimidyl 3-(bromoacetatnido)propionate (SBAP).

[0462] A polypeptide (e.g., an Fc polypeptide) can be modified with crosslinking reagents such as succinimidyl 4-(N-maleimidomethyl)-cyclohexane-1-carboxylate (SMCC), sulfo-SMCC, maleimidobenzoyl-N-hydroxysuccinimide ester (MBS), sulfo-MBS or succinimidyl-iodoacetate, as described in the literature, to introduce 1-10 reactive groups. The modified Fe polypeptide is then reacted with a thiol-containing cytotoxic agent to produce a conjugate.

[0463] For example, where a TMMP of the present disclosure comprises an Fe polypeptide, the polypeptide chain comprising the Fe polypeptide can be of the formula (A)-(L)-(C), where (A) is the polypeptide chain comprising the Fc polypeptide; where (L), if present, is a linker; and where (C) is a cytotoxic agent. (L), if present, links (A) to (C). In some cases, the polypeptide chain comprising the Fc polypeptide can comprise more than one cytotoxic agent (e.g., 2, 3, 4, or 5, or more than 5, cytotoxic agents).

[0464] Suitable drugs include, e.g., rapamycin. Suitable drugs include, e.g., retinoids, such as all-trans retinoic acid (ATRA); vitamin D3; a vitamin D3 analog; and the like. As noted above, in some cases, a drug is a cytotoxic agent. Cytotoxic agents are known in the art. A suitable cytotoxic agent can be any compound that results in the death of a cell, or induces cell death, or in some manner decreases cell viability, and includes, for example, maytansinoids and maytansinoid analogs, benzodiazepines, taxoids, CC-1065 and CC-1065 analogs, duocarmycins and duocarmycin analogs, enediynes, such as calicheamicins, dolastatin and dolastatin analogs including auristatins, tomaymycin derivatives, leptomycin derivatives, methotrexate, cisplatin, carboplatin, daunorubicin, doxorubicin, vincristine, vinblastine, melphalan, mitomycin C, chlorambucil and morpholino doxorubicin.

[0465] For example, in some cases, the cytotoxic agent is a compound that inhibits microtubule formation in eukaryotic cells. Such agents include, e.g., maytansinoid, benzodiazepine, taxoid, CC-1065, duocarmycin, a duocarmycin analog, calicheamicin, dolastatin, a dolastatin analog, auristatin, tomaymycin, and leptomycin, or a pro-drug of any one of the foregoing. Maytansinoid compounds include, e.g., N(2)-deacetyl-N(2)-(3-mercapto-1-oxopropyl)-maytansine (DM1); N(2′)-deacetyl-N(2′)-(4-mercapto-1-oxopentyl)-maytansine (DM3); and N(2′)-deacetyl-N2-(4-mercapto-4-methyl-1-oxopentyl)-maytansine (DM4). Benzodiazepines include, e.g., indolinobenzodiazepines and oxazolidinobenzodiazepines.

[0466] Cytotoxic agents include taxol; cytochalasin B; gramicidin D; ethidium bromide; emetine; mitomycin; etoposide; tenoposide; vincristine; vinblastine; colchicin; doxorubicin; daunorubicin; dihydroxy anthracin dione; maytansine or an analog or derivative thereof; an auristatin or a functional peptide analog or derivative thereof; dolastatin 10 or 15 or an analogue thereof; irinotecan or an analogue thereof; mitoxantrone; mithramycin; actinomycin D; 1-dehydrotestosterone; a glucocorticoid; procaine; tetracaine; lidocaine; propranolol; puromycin; calicheamicin or an analog or derivative thereof; an antimetabolite; 6 mercaptopurine; 6 thioguanine; cytarabine; fludarabin; 5 fluorouracil; decarbazine; hydroxyurea; asparaginase; gemcitabine; cladribine; an alkylating agent; a platinum derivative; duocarmycin A; duocarmycin SA; rachelmycin (CC-1065) or an analog or derivative thereof; an antibiotic; pyrrolo[2,1-c][1,4]-benzodiazepines (PDB); diphtheria toxin; ricin toxin; cholera toxin; a Shiga-like toxin; LT toxin; C3 toxin; Shiga toxin; pertussis toxin; tetanus toxin; soybean Bowman-Birk protease inhibitor; Pseudomonas exotoxin; alorin; saporin; modeccin; gelanin; abrin A chain; modeccin A chain; alpha-sarcin; Aleurites fordii proteins; dianthin proteins; Phytolacca americana proteins; Momordica charantia inhibitor; curcin; crotin; Sapaonaria officinalis inhibitor; gelonin; mitogellin; restrictocin; phenomycin; enomycin toxins; ribonuclease (RNase); DNase I; Staphylococcal enterotoxin A; pokeweed antiviral protein; diphtherin toxin: and Pseudomonas endotoxin.

### Exemplary TMMPs

[0467] A TMMP of the present disclosure comprises at least one heterodimer comprising: a) a first polypeptide comprising: i) an HPV peptide epitope; and ii) first MHC polypeptide; b) a second polypeptide comprising a second WIC polypeptide, and c) at least one immunomodulatory polypeptide, where the first and/or the second polypeptide comprises the immunomodulatory polypeptide. Thus, in some cases, a TMMP of the present disclosure comprises at least one heterodimer comprising: a) a first polypeptide comprising: i) an HPV peptide epitope; ii) first MHC polypeptide; and iii) at least one immunomodulatory polypeptide; and h) a second polypeptide comprising a second WIC polypeptide. In other instances, a TMMP of the present disclosure comprises at least one heterodimer comprising: a) a first polypeptide comprising: i) an HPV peptide epitope; and ii) first MHC polypeptide; and h) a second polypeptide comprising: i) a second MHC polypeptide; and ii) at least one immunomodulatory polypeptide. In some cases, a TMMP of the present disclosure comprises at least one heterodimer comprising: a) a first polypeptide comprising: i) an HPV peptide epitope; ii) first MHC polypeptide; and iii) at least one immunomodulatory polypeptide; and b) a second polypeptide comprising: i) a second MHC polypeptide; and ii) at least one immunomodulatory polypeptide. In some cases, the at least one immunomodulatory polypeptide is a wild-type immunomodulatory polypeptide. In other cases, the at least one immunomodulatory polypeptide is a variant immunomodulatory polypeptide that exhibits reduced affinity for a co-immunomodulatory polypeptide, compared to the affinity of a corresponding wild-type immunomodulatory polypeptide for the co-immunomodulatory polypeptide. In some cases, a TMMP of the present disclosure comprises two immunomodulatory polypeptides, where the two immunomodulatory polypeptides have the same amino acid sequence.

[0468] In some cases, a TMMP of the present disclosure comprises: a) a first polypeptide comprising, in order from N-terminus to C-terminus: i) an HPV peptide epitope; ii) a first MHC polypeptide; and iii) at least one immunomodulatory polypeptide; and b) a second polypeptide comprising, in order from N-terminus to C-terminus: i) a second MHC polypeptide; and ii) an Ig Fc polypeptide. In some cases, the first WIC polypeptide is a β2M polypeptide; and the second MHC polypeptide is an HLA heavy chain polypeptide. In some cases, the HLA heavy chain polypeptide is an HLA-A24 polypeptide. In some cases, the HLA heavy chain polypeptide is an HLA-A24 polypeptide with an A236C substitution. In some cases, the first polypeptide comprises, in order from N-terminus to C-terminus: i) an HPV peptide epitope; ii) a first MHC polypeptide; and iii) two immunomodulatory polypeptides, where the two immunomodulatory polypeptides have the same amino acid sequence. In some cases, the Ig Fc polypeptide is a human IgG1 Fe polypeptide. In some cases, the Ig Fc polypeptide is an IgG1 Fe polypeptide comprising L234A and L235A substitutions. In some cases, the first and the second polypeptides are disulfide linked to one another. In some cases, the immunomodulatory polypeptide is a variant IL-2 polypeptide comprising H116A and F42A substitutions. In some cases, the immunomodulatory polypeptide is a variant IL-2 polypeptide comprising H16T and F42A substitutions. In some cases, a peptide linker is between one or more of: i) the second MHC polypeptide and the Ig Fe polypeptide; ii) the epitope and the first WIC polypeptide; iii) the first MHC polypeptide and the immunomodulatory polypeptide; and (where the TMMP comprises two immunomodulatory polypeptides on the first polypeptide chain) iv) between the two immunomodulatory polypeptides. In some cases, the peptide linker comprises the amino acid sequence AAAGG (SEQ ID NO: 387). In some cases, the peptide linker comprises the amino acid sequence (GGGGS)n (SEQ ID NO: 284), where n is an integer from 1 to 10 (e.g., where n is 2, 3, or 4).

[0469] In some cases, a TMMP of the present disclosure comprises: a) a first polypeptide comprising, in order from N-terminus to C-terminus: i) an HPV peptide epitope; and ii) a first MHC polypeptide; and b) a second polypeptide comprising, in order from N-terminus to C-terminus: i) at least one immunomodulatory polypeptide; ii) a second MHC polypeptide; and iii) an Ig Fc polypeptide. In some cases, the first MHC polypeptide is a β2M polypeptide; and the second MHC polypeptide is an HLA heavy chain polypeptide. In some cases, the HLA heavy chain polypeptide is an HLA-A24 polypeptide. In some cases, the FILA heavy chain polypeptide is an HLA-A24 polypeptide with an A236C substitution. In some cases, the second polypeptide comprises, in order from N-terminus to C-terminus: i) two immunomodulatory polypeptides, where the two immunomodulatory polypeptides have the same amino acid sequence; ii) a second MHC polypeptide; and iii) an Ig Fc polypeptide. In some cases, the Ig Fc polypeptide is a human IgG1 Fe polypeptide. In some cases, the Ig Fc polypeptide is an IgG1 Fc polypeptide comprising L234A and L235A substitutions. In some cases, the first and the second polypeptides are disulfide linked to one another. In some cases, the immunomodulatory polypeptide is a variant IL-2 polypeptide comprising H16A and F42A substitutions. In some cases, the immunomodulatory polypeptide is a variant IL-2 polypeptide comprising H16T and F42A substitutions. In some cases, a peptide linker is between one or more of: i) the second MHC polypeptide and the Ig Fe polypeptide; ii) the epitope and the first MHC polypeptide; iii) the first MHC polypeptide and the immunomodulatory polypeptide; and (where the TMMP comprises two immunomodulatory polypeptides on the second polypeptide chain) iv) between the two immunomodulatory polypeptides. In some cases, the peptide linker comprises the amino acid sequence AAAGG (SEQ ID NO:387). In some cases, the peptide linker comprises the amino acid sequence (GGGGS)n (SEQ ID NO:284), where n is an integer from 1 to 10 (e.g., where n is 2, 3, or 4).

[0470] In some cases, a TMMP of the present disclosure comprises: a) a first polypeptide comprising, in order from N-terminus to C-terminus: i) an HPV peptide epitope; and ii) a first MHC polypeptide; and b) a second polypeptide comprising, in order from N-terminus to C-terminus: i) a second MHC polypeptide; ii) an Ig Fc polypeptide; and iii) at least one immunomodulatory polypeptide. In some cases, the first MHC polypeptide is a PM polypeptide; and the second MHC polypeptide is an HLA heavy chain polypeptide. In some cases, the HLA heavy chain polypeptide is an HLA-A24 polypeptide. In some cases, the HLA heavy chain polypeptide is an HLA-A24 polypeptide with an A236C substitution. In some cases, the second polypeptide comprises, in order from N-terminus to C-terminus: i) a second MHC polypeptide; ii) an Ig Fc polypeptide; and iii) two immunomodulatory polypeptides, where the two immunomodulatory polypeptides have the same amino acid sequence. In some cases, the Ig Fc polypeptide is a human IgG1 Fe polypeptide. In some cases, the Ig Fc polypeptide is an IgG1 Fc polypeptide comprising L234A and L235A substitutions. In some cases, the first and the second polypeptides are disulfide linked to one another. In some cases, the immunomodulatory polypeptide is a variant IL-2 polypeptide comprising 1116A and F42A substitutions. In some cases, the immunomodulatory polypeptide is a variant IL-2 polypeptide comprising H16T and F42A substitutions. In some cases, a peptide linker is between one or more of: i) the second MHC polypeptide and the Ig Fe polypeptide; ii) the epitope and the first MHC polypeptide; iii) the Ig Fc polypeptide and the immunomodulatory polypeptide; and (where the TMMP comprises two immunomodulatory polypeptides on the second polypeptide chain) iv) between the two immunomodulatory polypeptides. In some cases, the peptide linker comprises the amino acid sequence AAAGG (SEQ ID NO:387). In some cases, the peptide linker comprises the amino acid sequence (GGGGS)n (SEQ ID NO:284), where n is an integer from 1 to 10 (e.g., where n is 2, 3, or 4).

[0471] In some cases, a TMMP of the present disclosure comprises: a) a first polypeptide comprising, in order from N-terminus to C-terminus: i) an HPV peptide epitope; and ii) a first MHC polypeptide; and b) a second polypeptide comprising, in order from N-terminus to C-terminus: i) at least one immunomodulatory polypeptide; ii) a second MHC polypeptide; and iii) an Ig Fc polypeptide. In some cases, the first MHC polypeptide is a β2M polypeptide; and the second MHC polypeptide is an HLA heavy chain polypeptide. In some cases, the HLA heavy chain polypeptide is an HLA-A24 polypeptide. In some cases, the HLA heavy chain polypeptide is an HLA-A24 polypeptide with an A236C substitution. In some cases, the Ig Fc polypeptide is a human IgG1 Fe polypeptide. In some cases, the Ig Fc polypeptide is an IgG1 Fc polypeptide comprising L234A and L235A substitutions. In some cases, the first and the second polypeptides are disulfide linked to one another. In some cases, the immunomodulatory polypeptide is a valiant IL-2 polypeptide comprising H16A and F42A substitutions. In some cases, the immunomodulatory polypeptide is a variant IL-2 polypeptide comprising H16T and F42A substitutions.

[0472] In some cases, a TMMP of the present disclosure comprises: a) a first polypeptide comprising, in order from N-terminus to C-terminus: i) at least one immunomodulatory polypeptide; ii) an HPV peptide epitope; and iii) a first WIC polypeptide; and b) a second polypeptide comprising, in order from N-terminus to C-terminus: i) a second MHC polypeptide; and ii) an Ig Fe polypeptide. In some cases, the first WIC polypeptide is a β2M polypeptide; and the second MHC polypeptide is an HLA heavy chain polypeptide. In some cases, the HLA heavy chain polypeptide is an HLA-A24 polypeptide. In some cases, the HLA heavy chain polypeptide is an HLA-A24 polypeptide with an A236C substitution. In some cases, the first polypeptide comprises, in order from N-terminus to C-terminus: i) two immunomodulatory polypeptides, where the two immunomodulatory polypeptides have the same amino acid sequence; ii) an HPV peptide epitope; and iii) a first MHC polypeptide. In some cases, the Ig Fe polypeptide is a human IgG1 Fc polypeptide. In some cases, the Ig Fc polypeptide is an IgG1 Fc polypeptide comprising L234A and L235A substitutions. In some cases, the first and the second polypeptides are disulfide linked to one another. In some cases, the immunomodulatory polypeptide is a variant IL-2 polypeptide comprising H16A and F42A substitutions. In some cases, the immunomodulatory polypeptide is a variant IL-2 polypeptide comprising H16T and F42A substitutions. In some cases, a peptide linker is between one or more of: i) the second MHC polypeptide and the Ig Fe polypeptide; ii) the epitope and the first MHC polypeptide; iii) the immunomodulatory polypeptide and the epitope; and (where the TMMP comprises two immunomodulatory polypeptides on the first polypeptide chain) iv) between the two immunomodulatory polypeptides. In some cases, the peptide linker comprises the amino acid sequence AAAGG (SEQ ID NO: 387). In some cases, the peptide linker comprises the amino acid sequence (GGGGS)n (SEQ ID NO: 284), where a is an integer from 1 to 10 (e.g., where n is 2, 3, or 4).

[0473] In some cases, a TMMP of the present disclosure comprises: a) a first polypeptide comprising, in order from N-terminus to C-terminus: i) an A HPV FP peptide epitope; and ii) a first MHC polypeptide; and b) a second polypeptide comprising, in order from N-terminus to C-terminus: i) a second MHC polypeptide; ii) at least one immunomodulatory polypeptide; and iii) an Ig Fc polypeptide. In some cases, the first MHC polypeptide is a β2M polypeptide; and the second MHC polypeptide is an HLA heavy chain polypeptide. In some cases, the HLA heavy chain polypeptide is an HLA-A24 polypeptide. In some cases, the HLA heavy chain polypeptide is an HLA-A24 polypeptide with an A236C substitution. In some cases, the second polypeptide comprises, in order from N-terminus to C-terminus: i) a second WIC polypeptide; ii) two immunomodulatory polypeptides, where the two immunomodulatory polypeptides have the same amino acid sequence; and iii) an Ig Fc polypeptide. In some cases, the Ig Fc polypeptide is a human IgG1 Fc polypeptide. In some cases, the Ig Fc polypeptide is an IgG1 Fc polypeptide comprising L234A and L235A substitutions. In some cases, the first and the second polypeptides are disulfide linked to one another. In some cases, the immunomodulatory polypeptide is a variant IL-2 polypeptide comprising H1.6A and 1:42A substitutions. In some cases, the immunomodulatory polypeptide is a variant IL-2 polypeptide comprising H16T and F42A substitutions. In some cases, a peptide linker is between one or more of: i) the second MIX polypeptide and the immunomodulatory polypeptide; ii) the immunomodulatory polypeptide and the Ig Fc polypeptide; iii) the epitope and the first MHC polypeptide; iii) the first MHC polypeptide and the immunomodulatory polypeptide; and (where the TMMP comprises two immunomodulatory polypeptides on the second polypeptide chain) iv) between the two immunomodulatory polypeptides. In some cases, the peptide linker comprises the amino acid sequence AAAGG (SEQ ID NO: 387). In some cases, the peptide linker comprises the amino acid sequence (GGGGS)n (SEQ ID NO: 284), where n is an integer from 1 to 10 (e.g., where n is 2, 3, or 4).

[0474] As noted above, and as depicted schematically in FIG. 16, an immunomodulatory polypeptide (i.e., one or more immunomodulatory polypeptides) can be present in a TMMP of the present disclosure at any of a variety of positions. FIG. 16 depicts the position of two copies of a variant IL-2 polypeptide; however, the immunomodulatory polypeptide can be any of a variety of immunomodulatory polypeptide, as described herein. As depicted in FIG. 16, an immunomodulatory polypeptide can be: 1) N-terminal to the MHC class I heavy chain (position I); 2) C-terminal to the MHC class I heavy chain and N-terminal to the Ig Fc polypeptide; in other words, between the MHC class I heavy chain and the Ig Fc polypeptide (position 2); 3) C-terminal to the Ig Fc polypeptide (position 3); 4) N-terminal to the peptide epitope (position 4); or 5) C-terminal to the (QM polypeptide (position 5). “Position 1” refers to a position of the immunomodulatory polypeptide on the same polypeptide chain as the class 1 MHC heavy chain and N-terminal to the class I MHC heavy chain; e.g., where the TMMP comprises: a) a first polypeptide comprising, in order from N-terminus to C-terminus: i) a peptide epitope (e.g., an HPV peptide); and ii) a β2M polypeptide; and b) a second polypeptide comprising, in order from N-terminus to C-terminus: i) one or more immunomodulatory polypeptides; and ii) a class I WIC heavy chain polypeptide. “Position 2” refers to a position of the immunomodulatory polypeptide on the same polypeptide chain as the class 1 MHC heavy chain and C-terminal to the class I MHC heavy chain, but not at the C-terminus of the polypeptide chain; e.g., where the TMMP comprises: a) a first polypeptide comprising, in order from N-terminus to C-terminus: i) a peptide epitope (e.g., an HPV peptide); and ii) a β2M polypeptide; and b) a second polypeptide comprising, in order from N-terminus to C-terminus: i) a class I MHC heavy chain polypeptide; ii) one or more immunomodulatory polypeptides; and iii) an Ig Fe polypeptide. “Position 3” refers to a position of the immunomodulatory polypeptide on the same polypeptide chain as the class I MHC heavy chain and at the C-terminus of the polypeptide chain; e.g., where the TMMP comprises: a) a first polypeptide comprising, in order from N-terminus to C-terminus: i) a peptide epitope (e.g., an HPV peptide); and ii) a β2M polypeptide; and h) a second polypeptide comprising, in order from N-terminus to C-terminus: i) a class I WIC heavy chain polypeptide; ii) an Ig Fc polypeptide; and iii) one or more immunomodulatory polypeptides. “Position 4” refers to a position of the immunomodulatory polypeptide on the same polypeptide chain as the β2M polypeptide and N-terminal to the peptide epitope and the β2M polypeptide; e.g., where the TMMP comprises: a) a first polypeptide comprising, in order from N-terminus to C-terminus: i) one or more immunomodulatory polypeptides; ii) a peptide epitope (e.g., an HPV peptide); and iii) a β2M polypeptide; and b) a second polypeptide comprising a class I MHC heavy chain polypeptide (e.g., a second polypeptide comprising, in order from N-terminus to C-terminus: i) a class I MHC heavy chain polypeptide; and ii) an Ig Fc polypeptide. “Position 5” refers to a position of the immunomodulatory polypeptide on the same polypeptide chain as the β2M polypeptide and C-terminal to the β2M polypeptide (e.g., at the C-terminus of the polypeptide chain); e.g., where the TMMP comprises: a) a first polypeptide comprising, in order from N-terminus to C-terminus: i) a peptide epitope (e.g., an HPV peptide); ii) a β2M polypeptide; and iii) one or more immunomodulatory polypeptides; and b) a second polypeptide comprising a class I MHC heavy chain polypeptide (e.g., a second polypeptide comprising, in order from N-terminus to C-terminus: i) a class I WIC heavy chain polypeptide; and ii) an Ig Fc polypeptide.

[0475] Furthermore, as discussed above and as depicted schematically in FIG. 15A-15C the first polypeptide chain and the second polypeptide chain of a TMMP of the present disclosure can be linked by one or more disulfide bonds. For example, a TMMMP of the present disclosure can comprise: a) a first polypeptide chain comprising an β2M polypeptide having an R12C substitution; and b) a second polypeptide chain comprising a class I MHC heavy chain polypeptide having an A236C substitution; such that a disulfide bond forms between the Cys at position 12 of the β2M polypeptide in the first polypeptide chain and the Cys at position 236 of the class I WIC heavy chain polypeptide in the second polypeptide chain. As another example, a TMMMP of the present disclosure can comprise: a) a first polypeptide comprising, in order from N-terminus to C-terminus: i) a peptide epitope (e.g., an HPV peptide); ii) a peptide linker comprising a GCGG(G4S)ₙ sequence, where n is 1, 2, or 3; and iii) a β2M polypeptide; and b) a second polypeptide comprising a class 1 MHC heavy chain polypeptide having a Y84C substitution, such that a disulfide bond forms between the Cys in the peptide linker in the first polypeptide chain and the Cys at position 84 of the class I MHC heavy chain polypeptide in the second polypeptide chain. In other examples, a TMMP of the present disclosure can comprise: a) a first polypeptide comprising, in order from N-terminus to C-terminus: i) a peptide epitope (e.g., an HPV peptide); ii) a peptide linker comprising a GCGG(G4S) sequence, where n is 1, 2, or 3; and iii) a β2M polypeptide having an R12C substitution; and b) a second polypeptide comprising a class I MHC heavy chain polypeptide having a Y84C substitution and an A236C substitution; such that: i) a first disulfide bond forms between the Cys in the peptide linker in the first polypeptide chain and the Cys at position 84 of the class I MHC heavy chain polypeptide in the second polypeptide chain; and ii) a second disulfide bond forms between the Cys at position 12 of the (32N4 polypeptide in the first polypeptide chain and the Cys at position 236 of the class I MHC heavy chain polypeptide in the second polypeptide chain. For simplicity, the first disulfide bond is referred to as “G2C/Y84C”; and the second disulfide bond is referred to as “R12C/A236C.” A TMMP of the present disclosure can include: a) a G2C/Y84C disulfide bond and not an R12C/A236C disulfide bond; h) an R12C/A236C disulfide bond and not a G2C/Y84C disulfide bond; or c) a G2C/Y84C disulfide bond and an R12C/A236C disulfide bond.

[0476] A TMMP of the present disclosure can include: a) a G2C/Y84C disulfide bond and not an R12C/A236C disulfide bond; and h) at least one immunomodulatory polypeptide at position 1. A TMMP of the present disclosure can include: a) a G2C/Y84C disulfide bond and not an R12C/A236C disulfide bond; and b) at least one immunomodulatory polypeptide at position 2. A TMMP of the present disclosure can include: a) a G2C/Y84C disulfide bond and not an R1 2C/A236C disulfide bond; and 1)) at least one immunomodulatory polypeptide at position 3. A TMMP of the present disclosure can include: a) a G2C/Y84C disulfide bond and not an R12C/A236C disulfide bond; and b) at least one immunomodulatory polypeptide at position 4. A TMMP of the present disclosure can include: a) a G2C/Y84C disulfide bond and not an R12C/A236C disulfide bond: and h) at least one immunomodulatory polypeptide at position 5.

[0477] A TMMP of the present disclosure can include: a) an R12C/A236C disulfide bond and not a G2C/Y84C disulfide bond; and at least one immunomodulatory polypeptide at position 1. A TMMP of the present disclosure can include: a) an R12C/A236C disulfide bond and not a G2C/Y84C disulfide bond; and at least one immunomodulatory polypeptide at position 2. A TMMP of the present disclosure can include: a) an R12C/A236C disulfide bond and not a G2C/Y84C disulfide bond; and at least one immunomodulatory polypeptide at position 3. A TMMP of the present disclosure can include: a) an R12C/A236C disulfide bond and not a G2C/Y84C disulfide bond; and at least one immunomodulatory polypeptide at position 4. A TMMP of the present disclosure can include: a) an R12C/A236C disulfide bond and not a G2C/Y84C disulfide bond; and at least one immunomodulatory polypeptide at position 5.

[0478] A TMMP of the present disclosure can include: a) a G2C/Y84C disulfide bond and an R12C/A236C disulfide bond; and b) and at least one immunomodulatory polypeptide at position 1. A TMMP of the present disclosure can include: a) a G2C/Y84C disulfide bond and an R12C/A236C disulfide bond; and b) and at least one immunomodulatory polypeptide at position 2. A TMMP of the present disclosure can include: a) a G2C/Y84C disulfide bond and an R12C/A236C disulfide bond; and b) and at least one immunomodulatory polypeptide at position 3. A TMMP of the present disclosure can include: a) a G2C/Y84C disulfide bond and an R12C/A236C disulfide bond; and b) and at least one immunomodulatory polypeptide at position 4. A TMMP of the present disclosure can include: a) a G2C/Y84C disulfide bond and an R12C/A236C disulfide bond; and b) and at least one immunomodulatory polypeptide at position 5.

[0479] Non-limiting examples of amino acid sequences of first and second polypeptide chains of a TMMP of the present disclosure are provided in FIGS. 4A-4G.

[0480] In some cases, a TMMP of the present disclosure comprises: a) a first polypeptide chain comprising the amino acid sequence designated “3152” as depicted in FIG. 4D; and b) a second polypeptide chain comprising the amino acid sequence designated “3158” as depicted in FIG. 4A.

[0481] In some cases, a TMMP of the present disclosure comprises: a) a first polypeptide chain comprising the amino acid sequence designated “3153” as depicted in FIG. 4E; and b) a second polypeptide chain comprising the amino acid sequence designated “3158” as depicted in FIG. 4A.

[0482] In some cases, a TMMP of the present disclosure comprises: a) a first polypeptide chain comprising the amino acid sequence designated “3154” as depicted in FIG. 4F; and b) a second polypeptide chain comprising the amino acid sequence designated “3158” as depicted in FIG. 4A.

[0483] In some cases, a TMMP of the present disclosure comprises: a) a first polypeptide chain comprising the amino acid sequence designated “3155” as depicted ill FIG. 4G; and b) a second polypeptide chain comprising the amino acid sequence designated “3158” as depicted in FIG. 4A.

[0484] In some cases, a TMMP of the present disclosure comprises: a) a first polypeptide chain comprising the amino acid sequence designated “3152” as depicted in FIG. 4D; and h) a second polypeptide chain comprising the amino acid sequence designated “2750” as depicted in FIG. 4B.

[0485] In some cases, a TMMP of the present disclosure comprises: a) a first polypeptide chain comprising the amino acid sequence designated “3153” as depicted in FIG. 4E; and h) a second polypeptide chain comprising the amino acid sequence designated “2750” as depicted in FIG. 4B.

[0486] In some cases, a TMMP of the present disclosure comprises: a) a first polypeptide chain comprising the amino acid sequence designated “3154” as depicted in FIG. 4F; and b) a second polypeptide chain comprising the amino acid sequence designated “2750” as depicted in FIG. 4B.

[0487] In some cases, a TMMP of the present disclosure comprises: a) a first polypeptide chain comprising the amino acid sequence designated “3155” as depicted in FIG. 4G; and h) a second polypeptide chain comprising the amino acid sequence designated “2750” as depicted in FIG. 4B.

[0488] In some cases, a TMMP of the present disclosure comprises: a) a first polypeptide chain comprising the amino acid sequence designated “3152” as depicted in FIG. 4D; and b) a second polypeptide chain comprising the amino acid sequence designated “3159” as depicted in FIG. 4C.

[0489] In some cases, a TMMP of the present disclosure comprises: a) a first polypeptide chain comprising the amino acid sequence designated “3153” as depicted in FIG. 4E; and h) a second polypeptide chain comprising the amino acid sequence designated “3159” as depicted in FIG. 4C.

[0490] In some cases, a TMMP of the present disclosure comprises: a) a first polypeptide chain comprising the amino acid sequence designated “3154” as depicted in FIG. 4F; and b) a second polypeptide chain comprising the amino acid sequence designated “3159” as depicted in FIG. 4C.

[0491] In some cases, a TMMP of the present disclosure comprises: a) a first polypeptide chain comprising the amino acid sequence designated “3155” as depicted in FIG. 4G; and b) a second polypeptide chain comprising the amino acid sequence designated “3159” as depicted in FIG. 4C.

### Methods of Generating a Multimeric T-Cell Modulatory Polypeptide

[0492] The present disclosure provides a method of obtaining a TMMP comprising one or more variant immunomodulatory polypeptides that exhibit lower affinity for a cognate co-immunomodulatory polypeptide compared to the affinity of the corresponding parental wild-type immunomodulatory polypeptide for the co-immunomodulatory polypeptide, the method comprising: A) generating a library of TMMPs comprising a plurality of members, wherein each member comprises: a) a first polypeptide comprising: i) an epitope; and ii) a first major MHC polypeptide; and b) a second polypeptide comprising: i) a second MHC polypeptide; and ii) optionally an Ig Fc polypeptide or a non-Ig scaffold, wherein each member comprises a different variant immunomodulatory polypeptide on the first polypeptide, the second polypeptide, or both the first and the second polypeptide; B) determining the affinity of each member of the library for a cognate co-immunomodulatory polypeptide; and C) selecting a member that exhibits reduced affinity for the cognate co-immunomodulatory polypeptide. In some cases, the affinity is determined by bio-layer interferometry (BLI) using purified TMMP library members and the cognate co-immunomodulatory polypeptide. BLI methods are well known to those skilled in the art. A BLI assay is described above. See, e.g., Lad et al. (2015) J. Biomol. Screen. 20(4): 498-507; and Shah and Duncan (2014) J. Vis. Exp. 18:e51383.

[0493] The present disclosure provides a method of obtaining a TMMP that exhibits selective binding to a T-cell, the method comprising: A) generating a library of TMMPs comprising a plurality of members, wherein each member comprises: a) a first polypeptide comprising: i) an epitope; and ii) a first MHC polypeptide; and b) a second polypeptide comprising: i) a second MHC polypeptide; and ii) optionally an immunoglobulin (Ig) Fc polypeptide or a non-Ig scaffold, wherein each member comprises a different variant immunomodulatory polypeptide on the first polypeptide, the second polypeptide, or both the first and the second polypeptide, wherein the variant immunomodulatory polypeptide differs in amino acid sequence by from 1 amino acid to 10 amino acids from a parental wild-type immunomodulatory polypeptide; B) contacting a TMMP library member with a target T-cell expressing on its surface: i) a cognate co-immunomodulatory polypeptide that binds the parental wild-type immunomodulatory polypeptide; and ii) a T-cell receptor that binds to the epitope, wherein the TMMP library member comprises an epitope tag, such that the TMMP library member binds to the target T-cell; C) contacting the TMMP library member bound to the target T-cell with a fluorescently labeled binding agent that binds to the epitope tag, generating a TMMP library member/target T-cell/binding agent complex; D) measuring the mean fluorescence intensity (MFI) of the TMMP library member/target T-cell/binding agent complex using flow cytometry, wherein the MR measured over a range of concentrations of the TMMP library member provides a measure of the affinity and apparent avidity; and E) selecting a TMMP library member that selectively binds the target T cell, compared to binding of the TMMP library member to a control T cell that comprises: i) the cognate co-immunomodulatory polypeptide that binds the parental wild-type immunomodulatory polypeptide; and ii) a T-cell receptor that binds to an epitope other than the epitope present in the TMMP library member. In some cases, a TMMP library member that is identified as selectively binds to a target cell is isolated from the library.

[0494] In some cases, a parental wild-type immunomodulatory polypeptide and cognate immunomodulatory polypeptide pairs are selected from:

[0495] IL-2 and IL-2 receptor;

[0496] 4-1BBL and 4-11313;

[0497] PD-L1 and PD-1;

[0498] CD70 and CD27;

[0499] TGFβ and TGFβ receptor;

[0500] CD80 and CD28;

[0501] CD86 and CD28;

[0502] OX40L and OX40;

[0503] FasL and Fas;

[0504] ICOS-L and ICOS;

[0505] ICAM and LFA-1;

[0506] JAG1 and Notch;

[0507] MAG1 and CD46;

[0508] CD80 and CTLA4; and

[0509] CD86 and CTLA4.

[0510] The present disclosure provides a method of obtaining a TMMP comprising one or more variant immunomodulatory polypeptides that exhibit reduced affinity for a cognate co-immunomodulatory polypeptide compared to the affinity of the corresponding parental wild-type immunomodulatory polypeptide for the co-immunomodulatory polypeptide, the method comprising selecting, from a library of TMMPs comprising a plurality of members, a member that exhibits reduced affinity for the cognate co-immunomodulatory polypeptide, wherein the plurality of member comprises: a) a first polypeptide comprising: i) an epitope; and ii) a first MHC polypeptide; and b) a second polypeptide comprising: i) a second MHC polypeptide; and ii) optionally an Ig Fc polypeptide or a non-Ig scaffold, wherein the members of the library comprise a plurality of variant immunomodulatory polypeptide present in the first polypeptide, the second polypeptide, or both the first and the second polypeptide. In some cases, the selecting step comprises determining the affinity, using bio-layer interferometry, of binding between TMMP library members and the cognate co-immunomodulatory polypeptide. In some cases, the TMMP is as described above.

[0511] In some cases, the method further comprises: a) contacting the selected TMMP library member with a target T-cell expressing on its surface: i) a cognate co-immunomodulatory polypeptide that binds the parental wild-type immunomodulatory polypeptide; and ii) a T-cell receptor that binds to the epitope, wherein the TMMP library member comprises an epitope tag, such that the TMMP library member binds to the target T-cell; h) contacting the selected TMMP library member hound to the target T-cell with a fluorescently labeled binding agent that binds to the epitope tag, generating a selected TMMP library member/target T-cell/binding agent complex; and c) measuring the mean fluorescence intensity (MFI) of the selected TMMP library member/target T-cell/binding agent complex using flow cytometry, wherein the MFI measured over a range of concentrations of the selected TMMP library member provides a measure of the affinity and apparent avidity. A selected TMMP library member that selectively binds the target T cell, compared to binding of the TMMP library member to a control T cell that comprises: i) the cognate co-immunomodulatory polypeptide that binds the parental wild-type immunomodulatory polypeptide; and ii) a T-cell receptor that binds to an epitope other than the epitope present in the TMMP library member, is identified as selectively binding to the target ‘I’ cell. In some cases, the binding agent is an antibody specific for the epitope tag. In some cases, the variant immunomodulatory polypeptide comprises from 1 to 20 amino acid substitutions (e.g., 1, 2.3, 4, 5, 6, 7, 8, 9, 10, 11, 12, 13, 14, 15, 16, 17, 18, 19, or 20 amino acid substitutions) compared to the corresponding parental wild-type immunomodulatory polypeptide. In some cases, the TMMP comprises two variant immunomodulatory polypeptides. In some cases, the two variant immunomodulatory polypeptides comprise the same amino acid sequence. In some cases, the first polypeptide comprises one of the two variant immunomodulatory polypeptides and wherein the second polypeptide comprises the second of the two variant immunomodulatory polypeptides. In some cases, the two variant immunomodulatory polypeptides are on the same polypeptide chain of the TMMP. In some cases, the two variant immunomodulatory polypeptides are on the first polypeptide of the TMMP. In some cases, the two variant immunomodulatory polypeptides are on the second polypeptide of the TMMP.

[0512] In some cases, the method further comprises isolating the selected TMMP library member from the library. In some cases, the method further comprises providing a nucleic acid comprising a nucleotide sequence encoding the selected TMMP library member. In some cases, the nucleic acid is present in a recombinant expression vector. In some cases, the nucleotide sequence is operably linked to a transcriptional control element that is functional in a eukaryotic cell. In some cases, the method further comprises introducing the nucleic acid into a eukaryotic host cell, and culturing the cell in a liquid medium to synthesize the encoded selected TMMP library member in the cell. In some cases, the method further comprises isolating the synthesized selected TMMP library member from the cell or from liquid culture medium comprising the cell. In some cases, the selected TMMP library member comprises an Ig Fe polypeptide. In some cases, the method further comprises conjugating a drug to the Ig Fc polypeptide. In some cases, the drug is a cytotoxic agent is selected from maytansinoid, benzodiazepine, taxoid, CC-1065, duocarmycin, a duocarmycin analog, calicheamicin, dolastatin, a dolastatin analog, auristatin, tomaymycin, and leptomycin, or a pro-drug of any one of the foregoing. In some cases, the drug is a retinoid. In some cases, the parental wild-type immunomodulatory polypeptide and the cognate immunomodulatory polypeptides are selected from: IL-2 and IL-2 receptor; 4-1BBL and 4-1BB; PD-L1 and PD-1; CD70 and CD27; TGFβ and TGFβ receptor; CD80 and CD28; CD86 and CD28; OX40L and OX40; FasL and Fas; LCOS-L and LCOS; ICAM and LFA-1; JAG1 and Notch; JAG1 and CD46; CD80 and CTLA4; and CD86 and CTLA4.

[0513] The present disclosure provides a method of obtaining a TMMP comprising one or more variant immunomodulatory polypeptides that exhibit reduced affinity for a cognate co-immunomodulatory polypeptide compared to the affinity of the corresponding parental wild-type immunomodulatory polypeptide for the co-immunomodulatory polypeptide, the method comprising: A) providing a library of TMMPs comprising a plurality of members, wherein the plurality of member comprises: a) a first polypeptide comprising: i) an epitope; and ii) a first MHC polypeptide; and b) a second polypeptide comprising: i) a second MHC polypeptide; and ii) optionally an Ig Fc polypeptide or a non-Ig scaffold, wherein the members of the library comprise a plurality of variant immunomodulatory polypeptide present in the first polypeptide, the second polypeptide, or both the first and the second polypeptide; and B) selecting from the library a member that exhibits reduced affinity for the cognate co-immunomodulatory polypeptide. In some cases, the selecting step comprises determining the affinity, using bio-layer interferometry, of binding between TMMP library members and the cognate co-immunomodulatory polypeptide. In some cases, the TMMP is as described above.

[0514] In some cases, the method further comprises: a) contacting the selected TMMP library member with a target T-cell expressing on its surface: i) a cognate co-immunomodulatory polypeptide that binds the parental wild-type immunomodulatory polypeptide; and ii) a T-cell receptor that binds to the epitope, wherein the TMMP library member comprises an epitope tag, such that the TMMP library member binds to the target T-cell; h) contacting the selected TMMP library member hound to the target T-cell with a fluorescently labeled binding agent that binds to the epitope tag, generating a selected TMMP library member/target T-cell/binding ascent complex; and c) measuring the mean fluorescence intensity (MFI) of the selected TMMP library member/target T-cell/binding agent complex using flow cytometry, wherein the MFI measured over a range of concentrations of the selected TMMP library member provides a measure of the affinity and apparent avidity. A selected TMMP library member that selectively binds the target T cell, compared to binding of the TMMP library member to a control T cell that comprises: i) the cognate co-immunomodulatory polypeptide that binds the parental wild-type immunomodulatory polypeptide; and ii) a T-cell receptor that binds to an epitope other than the epitope present in the TMMP library member, is identified as selectively binding to the target T cell. In some cases, the binding agent is an antibody specific for the epitope tag. In some cases, the variant immunomodulatory polypeptide comprises from 1 to 20 amino acid substitutions (e.g., 1, 2, 3, 4, 5, 6, 7, 8, 9, 10, 11, 12, 13, 14, 15, 16, 17, 18, 19, or 20 amino acid substitutions) compared to the corresponding parental wild-type immunomodulatory polypeptide. In some cases, the TMMP comprises two variant immunomodulatory polypeptides. In some cases, the two variant immunomodulatory polypeptides comprise the same amino acid sequence. In some cases, the first polypeptide comprises one of the two variant immunomodulatory polypeptides and wherein the second polypeptide comprises the second of the two variant immunomodulatory polypeptides. In some cases, the two variant immunomodulatory polypeptides are on the same polypeptide chain of the TMMP. In some cases, the two variant immunomodulatory polypeptides are on the first polypeptide of the TMMP. In some cases, the two variant immunomodulatory polypeptides are on the second polypeptide of the TMMP.

[0515] In some cases, the method further comprises isolating the selected TMMP library member from the library. In some cases, the method further comprises providing a nucleic acid comprising a nucleotide sequence encoding the selected TMMP library member. In some cases, the nucleic acid is present in a recombinant expression vector. In some cases, the nucleotide sequence is operably linked to a transcriptional control element that is functional in a eukaryotic cell. In some cases, the method further comprises introducing the nucleic acid into a eukaryotic host cell, and culturing the cell in a liquid medium to synthesize the encoded selected TMMP library member in the cell. In some cases, the method further comprises isolating the synthesized selected TMMP library member from the cell or from liquid culture medium comprising the cell. In some cases, the selected TMMP library member comprises an Ig Fe polypeptide. In some cases, the method further comprises conjugating a drug to the Ig Fc polypeptide. In some cases, the drug is a cytotoxic agent is selected from maytansinoid, benzodiazepine, taxoid, CC-1065, duocarmycin, a duocarmycin analog, calicheamicin, dolastatin, a dolastatin analog, auristatin, tomaymycin, and leptomycin, or a pro-drug of any one of the foregoing. In some cases, the drug is a retinoid. In some cases, the parental wild-type immunomodulatory polypeptide and the cognate immunomodulatory polypeptides are selected from IL-2 and IL-2 receptor; 4-1BBL and 4-1BB; PD-L1 and PD-1; TGFβ and TGFβ receptor; CD80 and CD28; CD86 and CD28; OX40L and OX40; FasL and Fas; ICOS-L and 1COS; CD70 and CD27; ICAM and LFA-1; JAG1 and Notch; JAG1 and CD46; CD80 and CTLA4; and CD86 and CTLA4.

### Nucleic Acids

[0516] The present disclosure provides a nucleic acid comprising a nucleotide sequence encoding a TMMP of the present disclosure. The present disclosure provides a nucleic acid comprising a nucleotide sequence encoding a TMMP of the present disclosure.

[0517] The present disclosure provides nucleic acids comprising nucleotide sequences encoding a TMMP of the present disclosure. In some cases, the individual polypeptide chains of a TMMP of the present disclosure are encoded in separate nucleic acids. In some: cases, all polypeptide chains of a TMMP of the present disclosure are encoded in a single nucleic acid. In some cases, a first nucleic acid comprises a nucleotide sequence encoding a first polypeptide of a TMMP of the present disclosure; and a second nucleic acid comprises a nucleotide sequence encoding a second polypeptide of a TMMP of the present disclosure. In some cases, single nucleic acid comprises a nucleotide sequence encoding a first polypeptide of a TMMP of the present disclosure and a second polypeptide of a TMMP of the present disclosure.

### Separate Nucleic Acids Encoding Individual Polypeptide Chains of a Multimeric Polypeptide

[0518] The present disclosure provides nucleic acids comprising nucleotide sequences encoding a TMMP of the present disclosure. As noted above, in some cases, the individual polypeptide chains of a TMMP of the present disclosure are encoded in separate nucleic acids. In some cases, nucleotide sequences encoding the separate polypeptide chains of a TMMP of the present disclosure are operably linked to transcriptional control elements, e.g., promoters, such as promoters that are functional in a eukaryotic cell, where the promoter can be a constitutive promoter or an inducible promoter.

[0519] The present disclosure provides a first nucleic acid and a second nucleic acid, where the first nucleic acid comprises a nucleotide sequence encoding a first polypeptide of a TMMP of the present disclosure, where the first polypeptide comprises, in order from N-terminus to C-terminus: a) an epitope (e.g., a T-cell epitope); h) a first MHC polypeptide; and c) an immunomodulatory polypeptide (e.g., a reduced-affinity variant, as described above); and where the second nucleic acid comprises a nucleotide sequence encoding a second polypeptide of a TMMP of the present disclosure, where the second polypeptide comprises, in order from N-terminus to C-terminus: a) a second WIC polypeptide; and b) an Ig Fc polypeptide. Suitable T-cell epitopes, MHC polypeptides, immunomodulatory polypeptides, and Ig Fe polypeptides, are described above. In some cases, the nucleotide sequences encoding the first and the second polypeptides are operably linked to transcriptional control elements. In some cases, the transcriptional control element is a promoter that is functional in a eukaryotic cell. In some cases, the nucleic acids are present in separate expression vectors.

[0520] The present disclosure provides a first nucleic acid and a second nucleic acid, where the first nucleic acid comprises a nucleotide sequence encoding a first polypeptide of a TMMP of the present disclosure, where the first polypeptide comprises, in order from N-terminus to C-terminus: a) an epitope (e.g., a T-cell epitope); and b) a first MHC polypeptide; and where the second nucleic acid comprises a nucleotide sequence encoding a second polypeptide of a TMMP of the present disclosure, where the second polypeptide comprises, in order from N-terminus to C-terminus: a) an immunomodulatory polypeptide (e.g., a reduced-affinity variant as described above); h) a second MHC polypeptide; and c) an Ig Fc polypeptide. Suitable T-cell epitopes, MHC polypeptides, immunomodulatory polypeptides, and Ig Fc polypeptides, are described above. In some cases, the nucleotide sequences encoding the first and the second polypeptides are operably linked to transcriptional control elements. In some cases, the transcriptional control element is a promoter that is functional in a eukaryotic cell. In some cases, the nucleic acids are present in separate expression vectors.

### Nucleic Acid Encoding Two or More Polypeptides Present in a Multimeric Polypeptide

[0521] The present disclosure provides a nucleic acid comprising nucleotide sequences encoding at least the first polypeptide and the second polypeptide of a TMMP of the present disclosure. In some cases, where a TMMP of the present disclosure includes a first, second, and third polypeptide, the nucleic acid includes a nucleotide sequence encoding the first, second, and third polypeptides. In some cases, the nucleotide sequences encoding the first polypeptide and the second polypeptide of a TMMP of the present disclosure includes a proteolytically cleavable linker interposed between the nucleotide sequence encoding the first polypeptide and the nucleotide sequence encoding the second polypeptide. In some cases, the nucleotide sequences encoding the first polypeptide and the second polypeptide of a TMMP of the present disclosure includes an internal ribosome entry site (IRES) interposed between the nucleotide sequence encoding the first polypeptide and the nucleotide sequence encoding the second polypeptide. In some cases, the nucleotide sequences encoding the first polypeptide and the second polypeptide of a TMMP of the present disclosure includes a ribosome skipping signal (or cis-acting hydrolase element, CHYSEL) interposed between the nucleotide sequence encoding the first polypeptide and the nucleotide sequence encoding the second polypeptide. Examples of nucleic acids are described below, where a proteolytically cleavable linker is provided between nucleotide sequences encoding the first polypeptide and the second polypeptide of a TMMP of the present disclosure; in any of these embodiments, an IRES or a ribosome skipping signal can be used in place of the nucleotide sequence encoding the proteolytically cleavable linker.

[0522] In some cases, a first nucleic acid (e.g., a recombinant expression vector, an mRNA, a viral RNA, etc.) comprises a nucleotide sequence encoding a first polypeptide chain of a TMMP of the present disclosure; and a second nucleic acid (e.g., a recombinant expression vector, an mRNA, a viral RNA, etc.) comprises a nucleotide sequence encoding a second polypeptide chain of a TMMP of the present disclosure. In some cases, the nucleotide sequence encoding the first polypeptide, and the second nucleotide sequence encoding the second polypeptide, are each operably linked to transcriptional control elements, e.g., promoters, such as promoters that are functional in a eukaryotic cell, where the promoter can be a constitutive promoter or an inducible promoter.

[0523] The present disclosure provides a nucleic acid comprising a nucleotide sequence encoding a recombinant polypeptide, where the recombinant polypeptide comprises, in order from N-terminus to C-terminus: a) an epitope (e.g., a T-cell epitope); b) a first MHC polypeptide; c) an immunomodulatory polypeptide (e.g., a reduced-affinity variant as described above); d) a proteolytically cleavable linker; c) a second MHC polypeptide; and f) an immunoglobulin (Ig) Fe polypeptide. The present disclosure provides a nucleic acid comprising a nucleotide sequence encoding a recombinant polypeptide, where the recombinant polypeptide comprises, in order from N-terminus to C-terminus: a) a first leader peptide; h) the epitope; c) the first MHC polypeptide; d) the immunomodulatory polypeptide (e.g., a reduced-affinity variant as described above); e) the proteolytically cleavable linker; f) a second leader peptide; g) the second MHC polypeptide; and h) the Ig Fc polypeptide. The present disclosure provides a nucleic acid comprising a nucleotide sequence encoding a recombinant polypeptide, where the recombinant polypeptide comprises, in order from N-terminus to C-terminus: a) an epitope; h) a first MHC polypeptide; c) a proteolytically cleavable linker: d) an immunomodulatory polypeptide (e.g., a reduced-affinity variant as described above); e) a second MHC polypeptide; and f) an Ig Fc polypeptide. In some cases, the first leader peptide and the second leader peptide are a β2-M leader peptide. In some cases, the nucleotide sequence is operably linked to a transcriptional control element. In some cases, the transcriptional control element is a promoter that is functional in a eukaryotic cell.

[0524] Suitable WIC polypeptides are described above. In some cases, the first MHC polypeptide is a β2-microglobulin polypeptide; and wherein the second MHC polypeptide is an MHC class I heavy chain polypeptide. In some cases, the β2-microglobulin polypeptide comprises an amino acid sequence having at least 85% amino acid sequence identity to a β2M amino acid sequence depicted in FIG. 6. In some cases, the MHC class I heavy chain polypeptide is an HLA-A, HLA-B, HLA-C, HLA-E, HLA-F, HLA-G, HLA-K, or HLA-L heavy chain. In some cases, the MHC class I heavy chain polypeptide comprises an amino acid sequence having at least 85% amino acid sequence identity to the amino acid sequence depicted in any one of FIG. 9-13.

[0525] Suitable Fc polypeptides are described above. In some cases, the Ig Fc polypeptide is an IgG1 Fc polypeptide, an IgG2 Fc polypeptide, an IgG3 Fc polypeptide, an IgG4 Fc polypeptide, an IgA Fc polypeptide, or an IgM Fe polypeptide. In some cases, the Ig Fc polypeptide comprises an amino acid sequence having at least 85% amino acid sequence identity to an amino acid sequence depicted in FIG. 2A-2G.

[0526] Suitable immunomodulatory polypeptides are described above.

[0527] Suitable proteolytically cleavable linkers are described above. In some cases, the proteolytically cleavable linker comprises an amino acid sequence selected from: a) LEVLFQGP (SEQ ID NO:388); 1)) ENLYTQS (SEQ ID NO:389); c) DDDDK (SEQ ID NO:390); d) LVPR (SEQ ID NO:391); and e) GSGATNFSLLKQAGDVEENPGP (SEQ ID NO:392).

[0528] In some cases, a linker between the epitope and the first MHC polypeptide comprises a first Cys residue, and the second MHC polypeptide comprises an amino acid substitution to provide a second Cys residue, such that the first and the second Cys residues provide for a disulfide linkage between the linker and the second MHC polypeptide. In some cases, first MHC polypeptide comprises an amino acid substitution to provide a first Cys residue, and the second MHC polypeptide comprises an amino acid substitution to provide a second Cys residue, such that the first Cys residue and the second Cys residue provide for a disulfide linkage between the first MHC polypeptide and the second MHC polypeptide.

### Recombinant Expression Vectors

[0529] The present disclosure provides recombinant expression vectors comprising nucleic acids of the present disclosure. In some cases, the recombinant expression vector is a non-viral vector. In some cases, the recombinant expression vector is a viral construct, e.g., a recombinant adeno-associated virus construct (see, e.g., U.S. Pat. No. 7,078,387), a recombinant adenoviral construct, a recombinant lentiviral construct, a recombinant retroviral construct, a non-integrating viral vector, etc.

[0530] Suitable expression vectors include, but are not limited to, viral vectors (e.g. viral vectors based on vaccinia virus; poliovirus; adenovirus (see, e.g., Li et al., Invest Opthalmol Vis Sci 35:2543 2549, 1994; Borras et al., Gene Ther 6:515 524, 1999; Li and Davidson, PNAS 92:7700 7704, 1995; Sakamoto et al., H Gene Ther 5:1088 1097, 1999; WO 94/12649, WO 93/03769; WO 93/19191; WO 94/28938; WO 95/11984 and WO 95/00655); adeno-associated virus (see, e.g., Ali et al., Hum Gene Ther 9:81 86, 1998, Flannery et al., PNAS 94:6916 6921, 1997; Bennett et al., Invest Opthalmol Vis Sci 38:2857 2863, 1997; Jomary et al., Gene Ther 4:683 690, 1997, Rolling et al., Hum Gene Ther 10:641 648, 1999; Ali et al., Hum Mol Genet 5:591 594, 1996; Srivastava in WO 93/09239, Samulski et al., J. Vir. (1989) 63:3822-3828; Mendelson et al., Virol. (1988) 166:154-165; and Roue et al., PNAS (1993) 90:10613-10617); SV40; herpes simplex virus; human immunodeficiency virus (see, e.g., Miyoshi et al., PNAS 94:10319 23, 1997; Takahashi et al., J Virol 73:7812 7816, 1999); a retroviral vector (e.g., Murine Leukemia Virus, spleen necrosis virus, and vectors derived from retroviruses such as Rous Sarcoma Virus, Harvey Sarcoma Virus, avian leukosis virus, a lentivirus, human immunodeficiency virus, myeloproliferative sarcoma virus, and mammary tumor virus); and the like.

[0531] Numerous suitable expression vectors are known to those of skill in the art, and many are commercially available. The following vectors are provided by way of example; for eukaryotic host cells: pXT1, pSG5 (Stratagene), pSVK3, pBPV, pMSG, and pSVLSV40 (Pharmacia). However, any other vector may be used so long as it is compatible with the host cell.

[0532] Depending on the host/vector system utilized, any of a number of suitable transcription and translation control elements, including constitutive and inducible promoters, transcription enhancer elements, transcription terminators, etc. may be used in the expression vector (see e.g., Bitter et al. (1987) Methods in Enzymology, 153:516-544).

[0533] In some cases, a nucleotide sequence encoding a DNA-targeting RNA and/or a site-directed modifying polypeptide is operably linked to a control element, e.g., a transcriptional control element, such as a promoter. The transcriptional control element may be functional in either a eukaryotic cell, e.g., a mammalian cell; or a prokaryotic cell (e.g., bacterial or archaeal cell). In some cases, a nucleotide sequence encoding a DNA-targeting RNA and/or a site-directed modifying polypeptide is operably linked to multiple control elements that allow expression of the nucleotide sequence encoding a DNA-targeting RNA and/or a site-directed modifying polypeptide in both prokaryotic and eukaryotic cells.

[0534] Non-limiting examples of suitable eukaryotic promoters (promoters functional in a eukaryotic cell) include those from cytomegalovirus (CMV) immediate early, herpes simplex virus (HSV) thymidine kinase, early and late SV40, long terminal repeats (LTRs) from retrovirus, and mouse metallothionein-1. Selection of the appropriate vector and promoter is well within the level of ordinary skill in the art. The expression vector may also contain a ribosome binding site for translation initiation and a transcription terminator. The expression vector may also include appropriate sequences for amplifying expression.

### Genetically Modified Host Cells

[0535] The present disclosure provides a genetically modified host cell, where the host cell is genetically modified with a nucleic acid of the present disclosure.

[0536] Suitable host cells include eukaryotic cells, such as yeast cells, insect cells, and mammalian cells. In some cases, the host cell is a cell of a mammalian cell line. Suitable mammalian cell lines include human cell lines, non-human primate cell lines, rodent (e.g., mouse, rat) cell lines, and the like. Suitable mammalian cell lines include, but are not limited to, HeLa cells (e.g., American Type Culture Collection (ATCC) No. CCL-2), CHO cells (e.g., ATCC Nos. CRL9618, CCL61, CRL9096), 293 cells (e.g., ATCC No. CRL-1573), Vero cells, NIH 3T3 cells (e.g., ATCC No. CRL-1658), Huh-7 cells, BHK cells (e.g., ATCC No. CCL10), PC cells (ATCC No. CRL1721), COS cells, COS-7 cells (ATCC No. CRL1651), RAT1 cells, mouse L cells (ATCC No. CCL13), human embryonic kidney (HEK) cells (ATCC No. CRL1573), HLHepG2 cells, and the like.

[0537] In some cases, the host cell is a mammalian cell that has been genetically modified such that it does not synthesize endogenous MHC β2-M.

[0538] In some cases, the host cell is a mammalian cell that has been genetically modified such that it does not synthesize endogenous MHC Class 1 heavy chain. In some cases, the host cell is a mammalian cell that has been genetically modified such that it does not synthesize endogenous MHC β2-M and such that it dues not synthesize endogenous MHC Class I heavy chain.

### Compositions

[0539] The present disclosure provides compositions, including pharmaceutical compositions, comprising a TMMP (synTac) of the present disclosure. The present disclosure provides compositions, including pharmaceutical compositions, comprising a TMMP of the present disclosure. The present disclosure provides compositions, including pharmaceutical compositions, comprising a nucleic acid or a recombinant expression vector of the present disclosure.

### Compositions Comprising a Multimeric Polypeptide

[0540] A composition of the present disclosure can comprise, in addition to a TMMP of the present disclosure, one or more of: a salt, e.g., NaCl, MgCl₂, KCl, MgSO₄, etc.; a buffering agent, e.g., a Tris buffer, N-(2-Hydroxyethyl)piperazine-N′-(2-ethanesulfonic acid) (HEPES), 2-(N-Morpholino)ethanesulfonic acid (MES), 2-(N-Morpholino)ethanesulfonic acid sodium salt (MES), 3-(N-Morpholino)propanesulfonic acid (MOPS), N-tris[Hydroxymethyl]methyl-3-aminopropanesulfonic acid (TAPS), etc.; a solubilizing agent: a detergent, e.g., a non-ionic detergent such as Tween-20, etc.; a protease inhibitor; glycerol: and the like.

[0541] The composition may comprise a pharmaceutically acceptable excipient, a variety of which are known in the art and need not be discussed in detail herein. Pharmaceutically acceptable excipients have been amply described in a variety of publications, including, for example, “Remington: The Science and Practice of Pharmacy”, 19^{th} Ed. (1995), or latest edition, Mack Publishing Co; A. Gennaro (2000) “Remington: The Science and Practice of Pharmacy”, 20th edition, Lippincott, Williams, & Wilkins: Pharmaceutical Dosage Forms and Drug Delivery Systems (1999) H. C. Ansel et al., eds 7^{th} ed., Lippincott, Williams, & Wilkins; and Handbook of Pharmaceutical Excipients (2000) A. H. Kibbe et al., eds. 3^{rd} ed. Amer. Pharmaceutical Assoc.

[0542] A pharmaceutical composition can comprise a TMMP of the present disclosure, and a pharmaceutically acceptable excipient. In some cases, a subject pharmaceutical composition will be suitable for administration to a subject, e.g., will be sterile. For example, in some cases, a subject pharmaceutical composition will be suitable for administration to a human subject, e.g., where the composition is sterile and is free of detectable pyrogens and/or other toxins.

[0543] The protein compositions may comprise other components, such as pharmaceutical grades of mannitol, lactose, starch, magnesium stearate, sodium saccharin, talcum, cellulose, glucose, sucrose, magnesium, carbonate, and the like. The compositions may contain pharmaceutically acceptable auxiliary substances as required to approximate physiological conditions such as pH adjusting and buffering agents, toxicity adjusting agents and the like, for example, sodium acetate, sodium chloride, potassium chloride, calcium chloride, sodium lactate, hydrochloride, sulfate salts, solvates (e.g., mixed ionic salts, water, organics), hydrates (e.g., water), and the like.

[0544] For example, compositions may include aqueous solution, powder form, granules, tablets, pills, suppositories, capsules, suspensions, sprays, and the like. The composition may be formulated according to the various routes of administration described below.

[0545] Where a TMMP of the present disclosure is administered as an injectable (e.g. subcutaneously, intraperitoneally, intramuscularly, and/or intravenously) directly into a tissue, a formulation can be provided as a ready-to-use dosage form, or as non-aqueous form (e.g. a reconstitutable storage-stable powder) or aqueous form, such as liquid composed of pharmaceutically acceptable carriers and excipients. The protein-containing formulations may also be provided so as to enhance serum half-life of the TMMP following administration. For example, the TMMP may be provided in a liposome formulation, prepared as a colloid, or other conventional techniques for extending serum half-life. A variety of methods are available for preparing liposomes, as described in, e.g., Szoka et al. 1980 Ann. Rev. Biophys. Bioeng. 9:467, U.S. Pat. Nos. 4,235,871, 4,501,728 and 4,837,028. The preparations may also be provided in controlled release or slow-release forms.

[0546] Other examples of formulations suitable for parenteral administration include isotonic sterile injection solutions, anti-oxidants, bacteriostats, and solutes that render the formulation isotonic with the blood of the intended recipient, suspending agents, solubilizers, thickening agents, stabilizers, and preservatives. For example, a subject pharmaceutical composition can be present in a container, e.g., a sterile container, such as a syringe. The formulations can be presented in unit-dose or multi-dose sealed containers, such as ampules and vials, and can be stored in a freeze-dried (lyophilized) condition requiring only the addition of the sterile liquid excipient, for example, water, for injections, immediately prior to use. Extemporaneous injection solutions and suspensions can be prepared from sterile powders, granules, and tablets.

[0547] The concentration of a TMMP of the present disclosure in a formulation can vary widely (e.g., from less than about 0.1%, usually at or at least about 2% to as much as 20% to 50% or more by weight) and will usually be selected primarily based on fluid volumes, viscosities, and patient-based factors in accordance with the particular mode of administration selected and the patient's needs.

[0548] The present disclosure provides a container comprising a composition of the present disclosure, e.g., a liquid composition. The container can be, e.g., a syringe, an ampoule, and the like. In some cases, the container is sterile. In some cases, both the container and the composition are sterile.

[0549] The present disclosure provides compositions, including pharmaceutical compositions, comprising a TMMP of the present disclosure. A composition can comprise: a) a TMMP of the present disclosure; and b) an excipient, as described above. In some cases, the excipient is a pharmaceutically acceptable excipient.

[0550] In some cases, a TMMP of the present disclosure is present in a liquid composition. Thus, the present disclosure provides compositions (e.g., liquid compositions, including pharmaceutical compositions) comprising a TMMP of the present disclosure. In some cases, a composition of the present disclosure comprises: a) a TMMP of the present disclosure; and b) saline (e.g., 0.9% NaCl). In some cases, the composition is sterile. In some cases, the composition is suitable for administration to a human subject. e.g., where the composition is sterile and is free of detectable pyrogens and/or other toxins. Thus, the present disclosure provides a composition comprising: a) a TMMP of the present disclosure; and b) saline (e.g., 0.9% NaCl), where the composition is sterile and is free of detectable pyrogens and/or other toxins.

### Compositions Comprising a Nucleic Acid or a Recombinant Expression Vector

[0551] The present disclosure provides compositions, e.g., pharmaceutical compositions, comprising a nucleic acid or a recombinant expression vector of the present disclosure. A wide variety of pharmaceutically acceptable excipients is known in the art and need not be discussed in detail herein. Pharmaceutically acceptable excipients have been amply described in a variety of publications, including, for example, A. Gennaro (2000) “Remington: The Science and Practice of Pharmacy”, 20th edition, Lippincott, Williams, & Wilkins; Pharmaceutical Dosage Forms and Drug Delivery Systems (1999) H. C. Ansel et al., eds 7^{th} ed., Lippincott, Williams, & Wilkins; and Handbook of Pharmaceutical Excipients (2000) A. H. Kibbe et al., eds., 3^{rd} ed. Amer. Pharmaceutical Assoc.

[0552] A composition of the present disclosure can include: a) one or more nucleic acids or one or more recombinant expression vectors comprising nucleotide sequences encoding a TMMP; and h) one or more of: a buffer, a surfactant, an antioxidant, a hydrophilic polymer, a dextrin, a chelating agent, a suspending agent, a solubilizer, a thickening agent, a stabilizer, a bacteriostatic agent, a wetting agent, and a preservative. Suitable buffers include, but are not limited to, (such as N,N-his(2-hydroxyethyl)-2-aminoethanesulfonic acid (BES), bis(2-hydroxyethyl)amino-tris(hydroxymethyl)methane (BIS-Tris), N-(2-hydroxyethyl)piperazine-N′3-propanesulfonic acid (EPPS or HEPPS), glycylglycine, N-2-hydroxyehtylpiperazine-N′-2-ethanesulfonic acid (HEPES), 3-(N-morpholino)propane sulfonic acid (MOPS), piperazine-N,N′-bis(2-ethane-sulfonic acid) (PIPES), sodium bicarbonate, 3-(N-tris(hydroxymethyl)-methyl-amino)-2-hydroxy-propanesulfonic acid) TAPSO, (N-tris(hydroxymethyl)methyl-2-aminoethanesulfonic acid (TES), N-tris(hydroxymethyl)methyl-glycine (Tricine), tris(hydroxymethyl)-aminomethane (Tris), etc.). Suitable salts include. e.g., NaCl, MgCl₂. KCl, MgSO₄, etc.

[0553] A pharmaceutical formulation of the present disclosure can include a nucleic acid or recombinant expression vector of the present disclosure in an amount of from about 0.001% to about 90% (w/w). In the description of formulations, below, “subject nucleic acid or recombinant expression vector” will be understood to include a nucleic acid or recombinant expression vector of the present disclosure. For example, in some cases, a subject formulation comprises a nucleic acid or recombinant expression vector of the present disclosure.

[0554] A subject nucleic acid or recombinant expression vector can be admixed, encapsulated, conjugated or otherwise associated with other compounds or mixtures of compounds; such compounds can include, e.g., liposomes or receptor-targeted molecules. A subject nucleic acid or recombinant expression vector can be combined in a formulation with one or more components that assist in uptake, distribution and/or absorption.

[0555] A subject nucleic acid or recombinant expression vector composition can be formulated into any of many possible dosage forms such as, but not limited to, tablets, capsules, gel capsules, liquid syrups, soft gels, suppositories, and enemas. A subject nucleic acid or recombinant expression vector composition can also be formulated as suspensions in aqueous, non-aqueous or mixed media. Aqueous suspensions may further contain substances which increase the viscosity of the suspension including, for example, sodium carboxymethylcellulose, sorbitol and/or dextran. The suspension may also contain stabilizers.

[0556] A formulation comprising a subject nucleic acid or recombinant expression vector can be a liposomal formulation. As used herein, the term “liposome” means a vesicle composed of amphiphilic lipids arranged in a spherical bilayer or bilayers. Liposomes are unilamellar or multilamellar vesicles which have a membrane formed from a lipophilic material and an aqueous interior that contains the composition to be delivered. Cationic liposomes are positively charged liposomes that can interact with negatively charged DNA molecules to form a stable complex. Liposomes that are pH sensitive or negatively charged are believed to entrap DNA rather than complex with it. Both cationic and noncationic liposomes can be used to deliver a subject nucleic acid or recombinant expression vector.

[0557] Liposomes also include “sterically stabilized” liposomes, a term which, as used herein, refers to liposomes comprising one or more specialized lipids that, when incorporated into liposomes, result in enhanced circulation lifetimes relative to liposomes lacking such specialized lipids. Examples of sterically stabilized liposomes are those in which part of the vesicle-forming lipid portion of the liposome comprises one or more glycolipids or is derivatized with one or more hydrophilic polymers, such as a polyethylene glycol (PEG) moiety. Liposomes and their uses are further described in U.S. Pat. No. 6,287,860, which is incorporated herein by reference in its entirety.

[0558] The formulations and compositions of the present disclosure may also include surfactants. The use of surfactants in drug products, formulations and in emulsions is well known in the art. Surfactants and their uses are further described in U.S. Pat. No. 6,287,860.

[0559] In one embodiment, various penetration enhancers are included, to effect the efficient delivery of nucleic acids. In addition to aiding the diffusion of non-lipophilic drugs across cell membranes, penetration enhancers also enhance the permeability of lipophilic drugs. Penetration enhancers may be classified as belonging to one of five broad categories, i.e., surfactants, fatty acids, bile salts, chelating agents, and non-chelating non-surfactants. Penetration enhancers and their uses are further described in U.S. Pat. No. 6,287,860, which is incorporated herein by reference in its entirety.

[0560] Compositions and formulations for oral administration include powders or granules, microparticulates, nanoparticulates, suspensions or solutions in water or non-aqueous media, capsules, gel capsules, sachets, tablets, or minitablets. Thickeners, flavoring agents, diluents, emulsifiers, dispersing aids or hinders may be desirable. Suitable oral formulations include those in which a subject antisense nucleic acid is administered in conjunction with one or more penetration enhancers surfactants and chelators. Suitable surfactants include, but are not limited to, fatty acids and/or esters or salts thereof, bile acids and/or salts thereof. Suitable bile acids/salts and fatty acids and their uses are further described in U.S. Pat. No. 6,287,860. Also suitable are combinations of penetration enhancers, for example, fatty acids/salts in combination with bile acids/salts. An exemplary suitable combination is the sodium salt of lauric acid, capric acid, and UDCA. Further penetration enhancers include, but are not limited to, polyoxyethylene-9-lauryl ether, and polyoxyethylene-20-cetyl ether. Suitable penetration enhancers also include propylene glycol, dimethylsulfoxide, triethanoiamine, N,N-dimethylacetamide, N,N-dimethylformamide, 2-pyrrolidone and derivatives thereof, tetrahydrofurfuryl alcohol, and AZONE™.

### Methods of Modulating T Cell Activity

[0561] The present disclosure provides a method of selectively modulating the activity of an epitope-specific T cell, the method comprising contacting the T cell with a TMMP of the present disclosure, where contacting the T cell with a TMMP of the present disclosure selectively modulates the activity of the epitope-specific T cell. In some cases, the contacting occurs in vitro. In some cases, the contacting occurs in vim. In some cases, the contacting occurs ex vivo.

[0562] In some cases, e.g., where the target T cell is a CD8⁺ T cell, the TMMP comprises Class I MHC polypeptides (e.g., β2-microglobulin and Class I MHC heavy chain).

[0563] Where a TMMP of the present disclosure includes an immunomodulatory polypeptide that is an activating polypeptide, contacting the T cell with the TMMP activates the epitope-specific T cell. In some instances, the epitope-specific T cell is a T cell that is specific for an epitope present on a cancer cell, and contacting the epitope-specific T cell with the TMMP increases cytotoxic activity of the T cell toward the cancer cell. In some instances, the epitope-specific T cell is a T cell that is specific for an epitope present on a cancer cell, and contacting the epitope-specific T cell with the TMMP increases the number of the epitope-specific T cells.

[0564] In some instances, the epitope-specific T cell is a T cell that is specific for an epitope present on a virus-infected cell, and contacting the epitope-specific T cell with the TMMP increases cytotoxic activity of the T cell toward the virus-infected cell. In some instances, the epitope-specific T cell is a T cell that is specific for an epitope present on a virus-infected cell, and contacting the epitope-specific T cell with the TMMP increases the number of the epitope-specific T cells.

[0565] Where a TMMP of the present disclosure includes an immunomodulatory polypeptide that is an inhibiting polypeptide, contacting the T cell with the TMMP inhibits the epitope-specific T cell. In some instances, the epitope-specific T cell is a self-reactive T cell that is specific for an epitope present in a self antigen, and the contacting reduces the number of the self-reactive T cells.

[0566] The present disclosure provides a method of modulating an immune response in an individual, the method comprising administering to the individual an effective amount of a TMMP of the present disclosure. Administering the TMMP induces an epitope-specific T cell response (e.g., an HPV epitope-specific T-cell response) and an epitope-non-specific cell response, where the ratio of the epitope-specific T cell response to the epitope-non-specific T cell response is at least 2:1. In some cases, the ratio of the epitope-specific T cell response to the epitope-non-specific T cell response is at least 5:1. In some cases, the ratio of the epitope-specific T cell response to the epitope-non-specific T cell response is at least 10:1. In some cases, the ratio of the epitope-specific T cell response to the epitope-non-specific T cell response is at least 25:1. Jr some cases, the ratio of the epitope-specific T cell response to the epitope-non-specific T cell response is at least 50:1. In some cases, the ratio of the epitope-specific T cell response to the epitope-non-specific T cell response is at least 100:1. In some cases, the individual is a human. In some cases, the modulating increases a cytotoxic T-cell response to a cancer cell, e.g., an HPV-expressing cancer cell. In some cases, the administering is intravenous, subcutaneous, intramuscular, systemic, intralymphatic, distal to a treatment site, local, or at or near a treatment site.

[0567] The present disclosure provides a method of delivering a costimulatory (i.e., immunomodulatory) polypeptide selectively to target T cell, the method comprising contacting a mixed population of T cells with a TMMP of the present disclosure, where the mixed population of T cells comprises the target T cell and non-target T cells, where the target T cell is specific for the epitope present within the TMMP (e.g., where the target T cell is specific for the HPV epitope present within the TMMP), and where the contacting step delivers the one of more costimulatory polypeptides (immunomodulatory polypeptides) present within the TMMP to the target T cell. In some cases, the population of T cells is in vitro. In Some cases, the population of T cells is in vivo in an individual. In some cases, the method comprises administering the TMMP to the individual. In some case, the T cell is a cytotoxic T cell. In some cases, the mixed population of T cells is an in vitro population of mixed T cells obtained from an individual, and the contacting step results in activation and/or proliferation of the target T cell, generating a population of activated and/or proliferated target T cells; in some of these instances, the method further comprises administering the population of activated and/or proliferated target T cells to the individual.

[0568] The present disclosure provides a method of detecting, in a mixed population of T cells obtained from an individual, the presence of a target T cell that binds an epitope of interest (e.g., an HPV epitope), the method comprising: a) contacting in vitro the mixed population of T cells with a TMMP of the present disclosure, wherein the TMMP comprises the epitope of interest (e.g., the HPV epitope); and b) detecting activation and/or proliferation of T cells in response to said contacting, wherein activated and/or proliferated T cells indicates the presence of the target T cell.

### Treatment Methods

[0569] The present disclosure provides a method of treatment of an individual, the method comprising administering to the individual an amount of a TMMP of the present disclosure, or one or more nucleic acids encoding the TMMP, effective to treat the individual. Also provided is a TMMP of the present disclosure for use in a method of treatment of the human or animal body. In some cases, a treatment method of the present disclosure comprises administering to an individual in need thereof one or more recombinant expression vectors comprising nucleotide sequences encoding a TMMP of the present disclosure. In some cases, a treatment method of the present disclosure comprises administering to an individual in need thereof one or more mRNA molecules comprising nucleotide sequences encoding a TMMP of the present disclosure. In some cases, a treatment method of the present disclosure comprises administering to an individual in need thereof a TMMP of the present disclosure. Conditions that can be treated include, e.g., cancer and autoimmune disorders, as described below.

[0570] In some cases, a TMMP of the present disclosure, when administered to an individual in need thereof, induces both an epitope-specific T cell response and an epitope non-specific T cell response. In other words, in some cases, a TMMP of the present disclosure, when administered to an individual in need thereof, induces an epitope-specific T cell response by modulating the activity of a first T cell that displays both: i) a TCR specific for the epitope present in the TMMP; ii) a co-immunomodulatory polypeptide that binds to the immunomodulatory polypeptide present in the TMMP; and induces an epitope non-specific T cell response by modulating the activity of a second T cell that displays: i) a TCR specific for an epitope other than the epitope present in the TMMP; and ii) a co-immunomodulatory polypeptide that binds to the immunomodulatory polypeptide present in the TMMP. The ratio of the epitope-specific T cell response to the epitope-non-specific T cell response is at least 2:1, at least 5:1, at least 10:1, at least 15:1, at least 20:1, at least 25:1, at least 50:1, or at least 100:1. The ratio of the epitope-specific T cell response to the epitope-non-specific T cell response is from about 2:1 to about 5:1, from about 5:1 to about 10:1, from about 10:1 to about 15:1, from about 15:1 to about 20:1, from about 20:1 to about 25:1, from about 25:1 to about 50:1, or from about 50:1 to about 100:1, or more than 100:1. “Modulating the activity” of a T cell can include one or more of: i) activating a cytotoxic (e.g., CD8⁺) T cell; ii) inducing cytotoxic activity of a cytotoxic (e.g., CD8⁺) T cell; iii) inducing production and release of a cytotoxin (e.g., a perforin; a granzyme; a granulysin) by a cytotoxic (e.g., CD8+) T cell; iv) inhibiting activity of an autoreactive T cell; and the like.

[0571] The combination of the reduced affinity of the immunomodulatory polypeptide for its cognate co-immunomodulatory polypeptide, and the affinity of the epitope for a TCR, provides for enhanced selectivity of a TMMP of the present disclosure. Thus, for example, a TMMP of the present disclosure binds with higher avidity to a first T cell that displays both: i) a TCR specific for the epitope present in the TMMP; and ii) a co-immunomodulatory polypeptide that binds to the immunomodulatory polypeptide present in the TMMP, compared to the avidity to which it binds to a second T cell that displays: i) a TCR specific for an epitope other than the epitope present in the TMMP; and ii) a co-immunomodulatory polypeptide that binds to the immunomodulatory polypeptide present in the TMMP.

[0572] The present disclosure provides a method of selectively modulating the activity of an epitope-specific T cell in an individual, the method comprising administering to the individual an effective amount of a TMMP of the present disclosure, or one or more nucleic acids (e.g., expression vectors; mRNA; etc.) comprising nucleotide sequences encoding the TMMP, where the TMMP selectively modulates the activity of the epitope-specific T cell in the individual. Selectively modulating the activity of an epitope-specific T cell can treat a disease or disorder in the individual. Thus, the present disclosure provides a treatment method comprising administering to an individual in need thereof an effective amount of a TMMP of the present disclosure.

[0573] In some cases, the immunomodulatory polypeptide (“MOD”) is an activating polypeptide, and the TMMP activates the epitope-specific T cell. In some cases, the epitope is a cancer-associated epitope, and the TMMP increases the activity of a T cell specific for the cancer-associate epitope. In some cases, the MOD is an activating polypeptide, and the TMMP activates an HPV epitope-specific T-cell. In some cases, the T cells are T-helper cells (CD4⁺ cells), cytotoxic T-cells (CD8⁺ cells), or NK-T-cells. In some cases, the epitope is an HPV epitope, and the TMMP increases the activity of a T-cell specific for a cancer cell expressing the HPV epitope (e.g., T-helper cells (CD4⁺ cells), cytotoxic T-cells (CD8⁺ cells), and/or NK-T-cells). Activation of CD4⁺ T cells can include increasing proliferation of CD4⁺ T cells and/or inducing or enhancing release cytokines by CD4⁺ T cells. Activation of NK-T-cells and/or CD8+ cells can include: increasing proliferation of NK-T-cells and/or CD8+ cells; and/or inducing release of cytokines such as interferon γ by NK-T-cells and/or CD8+ cells. In some cases, a TMMP of the present disclosure reduces proliferation and/or activity of a regulatory T (Treg) cell. Tregs are FoxP3⁺, CD4⁺ T cells. In some cases, e.g., where a TMMP of the present disclosure comprises an inhibitory immunomodulatory polypeptide (e.g., PD-L1, FasL, and the like), the TMMP reduces the proliferation and/or activity of a Treg.

[0574] Where a TMMP of the present disclosure comprises an HPV peptide epitope, the TMMP can be administered to an individual in need thereof to treat cervical cancer in the individual. Where a TMMP of the present disclosure comprises an HPV peptide epitope, the TMMP can be administered to an individual in need thereof to treat prostate cancer in the individual. Where a TMMP of the present disclosure comprises an HPV peptide epitope, the TMMP can be administered to an individual in need thereof to treat ovarian cancer in the individual. In some cases, a TMMP of the present disclosure is administered to an individual who has been infected with HPV and who has atypical cells of undetermined significance (ACUS). In some cases, a TMMP of the present disclosure is administered to an individual who has been infected with HPV and who has had an abnormal pap smear results. In some cases, a TMMP of the present disclosure is administered to an individual who has been infected with HPV and who has been diagnosed with a precursor of cervical cancer. e.g., squamous intraepithelial lesion.

[0575] The present disclosure provides a method of treating cancer in an individual, the method comprising administering to the individual an effective amount of a TMMP of the present disclosure, or one or more nucleic acids (e.g., expression vectors; mRNA; etc.) comprising nucleotide sequences encoding the TMMP, where the TMMP comprises a T-cell epitope that is a cancer epitope, and where the TMMP comprises a stimulatory immunomodulatory polypeptide. In some cases, an “effective amount” of a TMMP of the present disclosure is an amount that, when administered in one or more doses to an individual in need thereof, reduces the number of cancer cells in the individual. For example, in some cases, an “effective amount” of a TMMP of the present disclosure is an amount that, when administered in one or more doses to an individual in need thereof, reduces the number of cancer cells in the individual by at least 10%, at least 15%, at least 20%, at least 25%, at least 30%, at least 40%, at least 50%, at least 60%, at least 70%, at least 80%, at least 90%, or at least 95%, compared to the number of cancer cells in the individual before administration of the TMMP, or in the absence of administration with the TMMP. In some cases, an “effective amount” of a TMMP of the present disclosure is an amount that, when administered in one or more doses to an individual in need thereof, reduces the number of cancer cells in the individual to undetectable levels.

[0576] In some cases, an “effective amount” of a TMMP of the present disclosure is an amount that, when administered in one or more doses to an individual in need thereof, reduces the tumor mass in the individual. For example, in some cases, an “effective amount” of a TMMP of the present disclosure is an amount that, when administered in one or more doses to an individual in need thereof (an individual having a tumor), reduces the tumor mass in the individual by at least 10%, at least 15%, at least 20%, at least 25%, at least 30%, at least 40%, at least 50%, at least 60%, at least 70%, at least 80%, at least 90%, or at least 95%, compared to the tumor mass in the individual before administration of the TMMP, or in the absence of administration with the TMMP. In some cases, an “effective amount” of a TMMP of the present disclosure is an amount that, when administered in one or more doses to an individual in need thereof (an individual having a tumor), reduces the tumor volume in the individual. For example, in some cases, an “effective amount” of a TMMP of the present disclosure is an amount that, when administered in one or more doses to an individual in need thereof (an individual having a tumor), reduces the tumor volume in the individual by at least 10%, at least 15%, at least 20%, at least 25%, at least 30%, at least 40%, at least 50%, at least 60%, at least 70%, at least 80%, at least 90%, or at least 95%, compared to the tumor volume in the individual before administration of the TMMP, or in the absence of administration with the TMMP. In some cases, an “effective amount” of a TMMP of the present disclosure is an amount that, when administered in one or more doses to an individual in need thereof, increases survival time of the individual. For example, in some cases, an “effective amount” of a TMMP of the present disclosure is an amount that, when administered in one or more doses to an individual in need thereof, increases survival time of the individual by at least 1 month, at least 2 months, at least 3 months, from 3 months to 6 months, from 6 months to 1 year, from 1 year to 2 years, from 2 years to 5 years, from 5 years to 10 years, or more than 10 years, compared to the expected survival time of the individual in the absence of administration with the TMMP.

[0577] In some instances, the epitope-specific T cell is a T cell that is specific for an epitope present on a virus-infected cell, and contacting the epitope-specific T cell with the TMMP increases cytotoxic activity of the T cell toward the virus-infected cell. In some instances, the epitope-specific T cell is a T cell that is specific for an epitope present on a virus-infected cell, and contacting the epitope-specific T cell with the TMMP increases the number of the epitope-specific T cells.

[0578] Thus, the present disclosure provides a method of treating a virus infection in an individual, the method comprising administering to the individual an effective amount of a TMMP of the present disclosure, or one or more nucleic acids comprising nucleotide sequences encoding the TMMP, where the TMMP comprises a T-cell epitope that is a viral epitope, and where the TMMP comprises a stimulatory immunomodulatory polypeptide. In some cases, an “effective amount” of a TMMP is an amount that, when administered in one or more doses to an individual in need thereof, reduces the number of virus-infected cells in the individual. For example, in some cases, an “effective amount” of a TMMP of the present disclosure is an amount that, when administered in one or more doses to an individual in need thereof, reduces the number of virus-infected cells in the individual by at least 10%, at least 15%, at least 20%, at least 25%, at least 30%, at least 40%, at least 50%, at least 60%, at least 70%, at least 80%, at least 90%, or at least 95%, compared to the number of virus-infected cells in the individual before administration of the TMMP, or in the absence of administration with the TMMP. In some cases, an “effective amount” of a TMMP of the present disclosure is an amount that, when administered in one or more doses to an individual in need thereof, reduces the number of virus-infected cells in the individual to undetectable levels.

[0579] Thus, the present disclosure provides a method of treating an infection in an individual, the method comprising administering to the individual an effective amount of a TMMP of the present disclosure, or one or more nucleic acids comprising nucleotide sequences encoding the TMMP, where the TMMP comprises a T-cell epitope that is a pathogen-associated epitope, and where the TMMP comprises a stimulatory immunomodulatory polypeptide. In some cases, an “effective amount” of a TMMP of the present disclosure is an amount that, when administered in one or more doses to an individual in need thereof, reduces the number of pathogens in the individual. For example, in some cases, an “effective amount” of a TMMP of the present disclosure is an amount that, when administered in one or more doses to an individual in need thereof, reduces the number of pathogens in the individual by at least 10%, at least 15%, at least 20%, at least 25%, at least 30%, at least 40%, at least 50%, at least 60%, at least 70%, at least 80%, at least 90%, or at least 95%, compared to the number of pathogens in the individual before administration of the TMMP, or in the absence of administration with the TMMP. In some cases, an “effective amount” of a TMMP of the present disclosure is an amount that, when administered in one or more doses to an individual in need thereof, reduces the number of pathogens in the individual to undetectable levels. Pathogens include viruses, bacteria, protozoans, and the like.

[0580] In some cases, the immunomodulatory polypeptide is an inhibitory polypeptide, and the TMMP inhibits activity of the epitope-specific T cell. In some cases, the epitope is a self-epitope, and the TMMP selectively inhibits the activity of a T cell specific for the self-epitope.

[0581] The present disclosure provides a method of treating an autoimmune disorder in an individual, the method comprising administering to the individual an effective amount of a TMMP of the present disclosure, or one or more nucleic acids comprising nucleotide sequences encoding the TMMP, where the TMMP comprises a T-cell epitope that is a self epitope, and where the TMMP comprises an inhibitory immunomodulatory polypeptide. In some cases, an “effective amount” of a TMMP of the present disclosure is an amount that, when administered in one or more doses to an individual in need thereof, reduces the number self-reactive T cells by at least 10%, at least 15%, at least 20%, at least 25%, at least 30%, at least 40%, at least 50%, at least 60%, at least 70%, at least 80%, at least 90%, or at least 95%, compared to number of self-reactive T cells in the individual before administration of the TMMP, or in the absence of administration with the TMMP. In some cases, an “effective amount” of a TMMP is an amount that, when administered in one or more doses to an individual in need thereof, reduces production of Th2 cytokines in the individual. In some cases, an “effective amount” of a TMMP of the present disclosure is an amount that, when administered in one or more doses to an individual in need thereof, ameliorates one or more symptoms associated with an autoimmune disease in the individual.

[0582] As noted above, in some cases, in carrying out a subject treatment method, a TMMP of the present disclosure is administered to an individual in need thereof, as the TMMP per se. In other instances, in carrying out a subject treatment method, one or more nucleic acids comprising nucleotide sequences encoding a TMMP of the present disclosure is/are administering to an individual in need thereof. Thus, in other instances, one or more nucleic acids of the present disclosure, e.g., one or more recombinant expression vectors of the present disclosure, is/arc administered to an individual in need thereof.

### Formulations

[0583] Suitable formulations are described above, where suitable formulations include a pharmaceutically acceptable excipient. In some cases, a suitable formulation comprises: a) a TMMP of the present disclosure: and b) a pharmaceutically acceptable excipient. In some cases, a suitable formulation comprises: a) a nucleic acid comprising a nucleotide sequence encoding a TMMP of the present disclosure; and b) a pharmaceutically acceptable excipient; in some instances, the nucleic acid is an mRNA. In some cases, a suitable formulation comprises: a) a first nucleic acid comprising a nucleotide sequence encoding the first polypeptide of a TMMP of the present disclosure; b) a second nucleic acid comprising a nucleotide sequence encoding the second polypeptide of a TMMP of the present disclosure: and c) a pharmaceutically acceptable excipient. In some cases, a suitable formulation comprises: a) a recombinant expression vector comprising a nucleotide sequence encoding a TMMP of the present disclosure; and b) a pharmaceutically acceptable excipient. In some cases, a suitable formulation comprises: a) a first recombinant expression vector comprising a nucleotide sequence encoding the first polypeptide of a TMMP of the present disclosure; b) a second recombinant expression vector comprising a nucleotide sequence encoding the second polypeptide of a TMMP of the present disclosure; and c) a pharmaceutically acceptable excipient.

[0584] Suitable pharmaceutically acceptable excipients are described above.

### Dosages

[0585] A suitable dosage can be determined by an attending physician or other qualified medical personnel, based on various clinical factors. As is well known in the medical arts, dosages for any one patient depend upon many factors, including the patient's size, body surface area, age, the particular polypeptide or nucleic acid to be administered, sex of the patient, time, and route of administration, general health, and other drugs being administered concurrently. A TMMP of the present disclosure may be administered in amounts between 1 ng/kg body weight and 20 mg/kg body weight per dose, e.g. between 0.1 mg/kg body weight to 10 mg/kg body weight, e.g. between 0.5 mg/kg body weight to 5 mg/kg body weight; however, doses below or above this exemplary range are envisioned, especially considering the aforementioned factors. If the regimen is a continuous infusion, it can also be in the range of 1 μg to 10 mg per kilogram of body weight per minute. A TMMP of the present disclosure can be administered in an amount of from about 1 mg/kg body weight to 50 mg/kg body weight, e.g., from about 1 mg/kg body weight to about 5 mg/kg body weight, from about 5 mg/kg body weight to about 10 mg/kg body weight, from about 10 mg/kg body weight to about 15 mg/kg body weight, from about 15 mg/kg body weight to about 20 mg/kg body weight, from about 20 mg/kg body weight to about 25 mg/kg body weight, from about 25 mg/kg body weight to about 30 mg/kg body weight, from about 30 mg/kg body weight to about 35 mg/kg body weight, from about 35 mg/kg body weight to about 40 mg/kg body weight, or from about 40 mg/kg body weight to about 50 mg/kg body weight.

[0586] In some cases, a suitable dose of a TMMP of the present disclosure is from 0.01 μg to 100 g per kg of body weight, from 0.1 μg to 10 g per kg of body weight, from 1 μg to 1 g per kg of body weight, from 10 μg to 100 mg per kg of body weight, from 100 μg to 10 mg per kg of body weight, or from 100 μg to 1 mg per kg of body weight. Persons of ordinary skill in the art can easily estimate repetition rates for dosing based on measured residence times and concentrations of the administered agent in bodily fluids or tissues. Following successful treatment, it may be desirable to have the patient undergo maintenance therapy to prevent the recurrence of the disease state, wherein a TMMP of the present disclosure is administered in maintenance doses, ranging from 0.01 μg to 100 g per kg of body weight, from 0.1 μg to 10 g per kg of body weight, from 1 μg to 1 g per kg of body weight, from 10 μg to 100 mg per kg of body weight, from 100 μg to 10 mg per kg of body weight, or from 100 μg to 1 mg per kg of body weight.

[0587] Those of skill will readily appreciate that dose levels can vary as a function of the specific TMMP, the severity of the symptoms and the susceptibility of the subject to side effects. Preferred dosages for a given compound are readily determinable by those of skill in the art by a variety of means.

[0588] In some cases, multiple doses of a TMMP of the present disclosure, a nucleic acid of the present disclosure, or a recombinant expression vector of the present disclosure are administered. The frequency of administration of a TMMP of the present disclosure, a nucleic acid of the present disclosure, or a recombinant expression vector of the present disclosure can vary depending on any of a variety of factors, e.g., severity of the symptoms, etc. For example, in some cases, a TMMP of the present disclosure, a nucleic acid of the present disclosure, or a recombinant expression vector of the present disclosure is administered once per month, twice per month, three times per month, every other week (qow), once per week (qw), twice per week (biw), three times per week (tiw), four times per week, five times per week, six times per week, every other day (qod), daily (qd), twice a day (qid), or three times a day (tid).

[0589] The duration of administration of a TMMP of the present disclosure, a nucleic acid of the present disclosure, or a recombinant expression vector of the present disclosure, e.g., the period of time over which a TMMP of the present disclosure, a nucleic acid of the present disclosure, or a recombinant expression vector of the present disclosure is administered, can vary, depending on any of a variety of factors, e.g., patient response, etc. For example, a TMMP of the present disclosure, a nucleic acid of the present disclosure, or a recombinant expression vector of the present disclosure can be administered over a period of time ranging from about one day to about one week, from about two weeks to about four weeks, from about one month to about two months, from about two months to about four months, from about four months to about six months, from about six months to about eight months, from about eight months to about 1 year, from about 1 year to about 2 years, or from about 2 years to about 4 years, or more.

### Routes of Administration

[0590] An active agent (a TMMP of the present disclosure, a nucleic acid of the present disclosure, or a recombinant expression vector of the present disclosure) is administered to an individual using any available method and route suitable for drug delivery, including in vivo and ex vivo methods, as well as systemic and localized routes of administration.

[0591] Conventional and pharmaceutically acceptable routes of administration include intratumoral, peritumoral, intramuscular, intralymphatic, intratracheal, intracranial, subcutaneous, intradermal, topical application, intravenous, intraarterial, rectal, nasal, oral, and other enteral and parenteral routes of administration. Routes of administration may be combined, if desired, or adjusted depending upon the TMMP and/or the desired effect. A TMMP of the present disclosure, or a nucleic acid or recombinant expression vector of the present disclosure, can be administered in a single dose or in multiple doses.

[0592] In some cases, a TMMP of the present disclosure, a nucleic acid of the present disclosure, or a recombinant expression vector of the present disclosure is administered intravenously. In some cases, a TMMP of the present disclosure, a nucleic acid of the present disclosure, or a recombinant expression vector of the present disclosure is administered intramuscularly. In some cases, a TMMP of the present disclosure, a nucleic acid of the present disclosure, or a recombinant expression vector of the present disclosure is administered intralymphatically. In some cases, a TMMP of the present disclosure, a nucleic acid of the present disclosure, or a recombinant expression vector of the present disclosure is administered locally. In some cases, a TMMP of the present disclosure, a nucleic acid of the present disclosure, or a recombinant expression vector of the present disclosure is administered intratumorally. In some cases, a TMMP of the present disclosure, a nucleic acid of the present disclosure, or a recombinant expression vector of the present disclosure is administered peritumorally. In some cases, a TMMP of the present disclosure, a nucleic acid of the present disclosure, or a recombinant expression vector of the present disclosure is administered intracranially. In some cases, a TMMP of the present disclosure, a nucleic acid of the present disclosure, or a recombinant expression vector of the present disclosure is administered subcutaneously.

[0593] In some cases, a TMMP of the present disclosure is administered intravenously. In some cases, a TMMP of the present disclosure is administered intramuscularly. In some cases, a TMMP of the present disclosure is administered locally. In some cases, a TMMP the present disclosure is administered intratumorally. In some cases, a TMMP of the present disclosure is administered peritumorally. In some cases, a TMMP of the present disclosure is administered intracranially. In some cases, a TMMP is administered subcutaneously. In some cases, a TMMP of the present disclosure is administered intralymphatically.

[0594] A TMMP of the present disclosure, a nucleic acid of the present disclosure, or a recombinant expression vector of the present disclosure can be administered to a host using any available conventional methods and routes suitable for delivery of conventional drugs, including systemic or localized routes. In general, routes of administration contemplated for use in a method of the present disclosure include, but are not necessarily limited to, enteral, parenteral, and inhalational routes.

[0595] Parenteral routes of administration other than inhalation administration include, but are not necessarily limited to, topical, transdermal, subcutaneous, intramuscular, intraorbital, intracapsular, intraspinal, intrasternal, intratumoral, intralymphatic, peritumoral, and intravenous routes, i.e., any route of administration other than through the alimentary canal. Parenteral administration can be carried to effect systemic or local delivery of a TMMP of the present disclosure, a nucleic acid of the present disclosure, or a recombinant expression vector of the present disclosure. Where systemic delivery is desired, administration typically involves invasive or systemically absorbed topical or mucosal administration of pharmaceutical preparations.

### Combination Therapies

[0596] In some cases, a method of the present disclosure for treating cancer in an individual comprises: a) administering a TMMP of the present disclosure; and h) administering at least one additional therapeutic agent or therapeutic treatment. Suitable additional therapeutic agents include, but are not limited to, a small molecule cancer chemotherapeutic agent, and an immune checkpoint inhibitor. Suitable additional therapeutic treatments include, e.g., radiation, surgery (e.g., surgical resection of a tumor), and the like.

[0597] A treatment method of the present disclosure can comprise co-administration of a TMMP of the present disclosure and at least one additional therapeutic agent. By “co-administration” is meant that both a TMMP of the present disclosure and at least one additional therapeutic agent are administered to an individual, although not necessarily at the same time, in order to achieve a therapeutic effect that is the result of having administered both the TMMP and the at least one additional therapeutic agent. The administration of the TMMP and the at least one additional therapeutic agent can be substantially simultaneous, e.g., the TMMP can be administered to an individual within about 1 minute to about 24 hours (e.g., within about 1 minute, within about 5 minutes, within about 15 minutes, within about 30 minutes, within about 1 hour, within about 4 hours, within about 8 hours, within about 12 hours, or within about 24 hours) of administration of the at least one additional therapeutic agent. In some cases, a TMMP of the present disclosure is administered to an individual who is undergoing treatment with, or who has undergone treatment with, the at least one additional therapeutic agent. The administration of the TMMP can occur at different times and/or at different frequencies.

[0598] As an example, a treatment method of the present disclosure can comprise co-administration of a TMMP of the present disclosure and an immune checkpoint inhibitor such as an antibody specific for an immune checkpoint. By “co-administration” is meant that both a TMMP of the present disclosure and an immune checkpoint inhibitor (e.g., an antibody specific for an immune checkpoint polypeptide) are administered to an individual, although not necessarily at the same time, in order to achieve a therapeutic effect that is the result of having administered both the TMMP and the immune checkpoint inhibitor (e.g., an antibody specific for an immune checkpoint polypeptide). The administration of the TMMP and the immune checkpoint inhibitor (e.g., an antibody specific for an immune checkpoint polypeptide) can be substantially simultaneous, e.g., the TMMP can be administered to an individual within about 1 minute to about 24 hours (e.g., within about 1 minute, within about 5 minutes, within about 15 minutes, within about 30 minutes, within about 1 hour, within about 4 hours, within about 8 hours, within about 12 hours, or within about 24 hours) of administration of the immune checkpoint inhibitor (e.g., an antibody specific for an immune checkpoint polypeptide). In some cases, a TMMP of the present disclosure is administered to an individual who is undergoing treatment with, or who has undergone treatment with, an immune checkpoint inhibitor (e.g., an antibody specific for an immune checkpoint polypeptide). The administration of the TMMP and the immune checkpoint inhibitor (e.g., an antibody specific for an immune checkpoint polypeptide) can occur at different times and/or at different frequencies.

[0599] Exemplary immune checkpoint inhibitors include inhibitors that target an immune checkpoint polypeptide such as CD27, CD28, CD40, CD122, CD96, CD73, CD47, OX40, GITR, CSF1R, JAK, PI3K delta, PI3K gamma, TAM, arginase, CD137 (also known as 4-1BB), ICOS, A2AR, B7-H3, B7-H4, BTLA, CTLA-4, LAG3, T1M3, VISTA, CD96, TIGIT, CD122, PD-1, PD-L1 and PD-L2. In some cases, the immune checkpoint polypeptide is a stimulatory checkpoint molecule selected from CD27, CD28, CD40, ICOS, OX40, GITR, CD122 and CD137. In some cases, the immune checkpoint polypeptide is an inhibitory checkpoint molecule selected from A2AR, B7-H3, B7-H4, BTLA, CTLA-4, IDO, KIR, LAG3, PD-1, TIM3, CD96, TIGIT and VISTA.

[0600] In some cases, the immune checkpoint inhibitor is an antibody specific for an immune checkpoint polypeptide. In some cases, the anti-immune checkpoint antibody is a monoclonal antibody. In some cases, the anti-immune checkpoint antibody is humanized, or de-immunized such that the antibody does not substantially elicit an immune response in a human. In some cases, the anti-immune checkpoint antibody is a humanized monoclonal antibody. In some cases, the anti-immune checkpoint antibody is a de-immunized monoclonal antibody. In some cases, the anti-immune checkpoint antibody is a fully human monoclonal antibody. In some cases, the anti-immune checkpoint antibody inhibits binding of the immune checkpoint polypeptide to a ligand for the immune checkpoint polypeptide. In some cases, the anti-immune checkpoint antibody inhibits binding of the immune checkpoint polypeptide to a receptor for the immune checkpoint polypeptide.

[0601] Suitable anti-immune checkpoint antibodies include, but are not limited to, nivolumab (Bristol-Myers Squibb), pembrolizumab (Merck), pidilizumab (Curetech), AMP-224 (GlaxoSmithKline/Amplimmune), MFDL3280A (Roche), MDX-1105 (Medarex. Inc./Bristol Myer Squibb), MEDI-4736 (Medimmune/AstraZeneca), arelumab (Merck Serono), ipilimumab (YERVOY, (Bristol-Myers Squibb), tremelimumab (Pfizer), pidilizumab (CureTech, Ltd.), IMP321 (Immutep S.A.), MGA271 (Maerogenics), BMS-986016 (Bristol-Meyers Squibb), lirilumab (Bristol-Myers Squibb), urelumah (Bristol-Meyers Squibb), PF-05082566 (Pfizer), IPH2101 (Innate Pharma/Bristol-Myers Squibb), MEDI-6469 (MedImmune/AZ), CP-870,893 (Genentech), Mogamulizumab (Kyowa Hakko Kirin), Varlilumab (CellDex Therapeutics), Avelumab (EMD Serono), Galiximab (Biogen Idec), AMP-514 (Amplimmune/AZ), AUNP 12 (Aurigene and Pierre Fabre), Indoximod (NewLink Genetics), NLG-919 (NewLink Genetics), INCB024360 (incyte); KN035; and combinations thereof. For example, in some cases, the immune checkpoint inhibitor is an anti-PD-1 antibody. Suitable anti-PD-1 antibodies include, e.g., nivolumab, pembrolizumab (also known as MK-3475), pidilizumab, SUR-1210, PDR001, and AMP-224. In some cases, the anti-PD-1 monoclonal antibody is nivolumah, pembrolizumab or PDR001. Suitable anti-PD1 antibodies are described in U.S. Patent Publication No. 2017/0044259. For pidilizumab, see, e.g., Rosenblatt et al. (2011) J. Immunother. 34:409-18. In some cases, the immune checkpoint inhibitor is an anti-CTLA-4 antibody. In some cases, the anti-CTLA-4 antibody is ipilimumab or tremelimumab. For tremelimumab, see, e.g., Ribas et al. (2013) J. Clin. Oncol. 31:616-22. In some cases, the immune checkpoint inhibitor is an anti-PD-L1 antibody. In some cases, the anti-PD-L1 monoclonal antibody is BMS-935559, MEDI4736, MPDL3280A (also known as RG7446), KN035, or MSB0010718C. In some embodiments, the anti-PD-L1 monoclonal antibody is MPDL3280A (atezolizumab) or MEDI4736 (durvalumah). For durvalumab, see, e.g., WO 2011/066389. For atezolizumab, see, e.g., U.S. Pat. No. 8,217,149.

### Subjects Suitable for Treatment

[0602] Subjects suitable for treatment with a method of the present disclosure include individuals who have cancer, including individuals who have been diagnosed as having cancer, individuals who have been treated for cancer but who failed to respond to the treatment, and individuals who have been treated for cancer and who initially responded but subsequently became refractory to the treatment. Subjects suitable for treatment with a method of the present disclosure include individuals who have an infection (e.g., an infection with a pathogen such as a bacterium, a virus, a protozoan, etc.), including individuals who have been diagnosed as having an infection, and individuals who have been treated for an infection but who failed to respond to the treatment. Subjects suitable for treatment with a method of the present disclosure include individuals who have bacterial infection, including individuals who have been diagnosed as having a bacterial infection, and individuals who have been treated for a bacterial infection but who failed to respond to the treatment. Subjects suitable for treatment with a method of the present disclosure include individuals who have a viral infection, including individuals who have been diagnosed as having a viral infection, and individuals who have been treated for a viral infection but who failed to respond to the treatment. Subjects suitable for treatment with a method of the present disclosure include individuals who have an autoimmune disease, including individuals who have been diagnosed as having an autoimmune disease, and individuals who have been treated for an autoimmune disease but who failed to respond to the treatment.

### Examples of Non-Limiting Aspects of the Disclosure

### Aspects Set A

[0603] Aspects, including embodiments, of the present subject matter described above may be beneficial alone or in combination, with one or more other aspects or embodiments. Without limiting the foregoing description, certain non-limiting aspects of the disclosure numbered 1-94 are provided below. As will be apparent to those of skill in the art upon reading this disclosure, each of the individually numbered aspects may be used or combined with any of the preceding or following individually numbered aspects. This is intended to provide support for all such combinations of aspects and is not limited to combinations of aspects explicitly provided below:

[0604] Aspect 1. A T-cell modulatory multimeric polypeptide comprising: at least one heterodimer comprising: a) a first polypeptide comprising: i) a human papilloma virus (HPV) peptide epitope, wherein the HPV peptide has a length of at least 4 amino acids; and ii) first major histocompatibility complex (MHC) polypeptide; b) a second polypeptide comprising a second MHC polypeptide, and c) at least one immunomodulatory polypeptide, wherein the first and/or the second polypeptide comprises the immunomodulatory polypeptide.

[0605] Aspect 2. T-cell modulatory multimeric polypeptide of aspect 1, wherein at least one of the one or more immunomodulatory domains is a variant immunomodulatory polypeptide that exhibits reduced affinity to a cognate co-immunomodulatory polypeptide compared to the affinity of a corresponding wild-type immunomodulatory polypeptide for the cognate co-immunomodulatory polypeptide, and wherein the epitope binds to a T-cell receptor (TCR) on a T cell with an affinity of at least 10⁻⁷ M, such that: i) the T-cell modulatory multimeric polypeptide binds to a first T cell with an affinity that is at least 25% higher than the affinity with which the T-cell modulatory multimeric polypeptide binds a second T cell, wherein the first T cell expresses on its surface the cognate co-immunomodulatory polypeptide and a TCR that binds the epitope with an affinity of at least 10⁻⁷M, and wherein the second T cell expresses on its surface the cognate co-immunomodulatory polypeptide but does not express on its surface a TCR that binds the epitope with an affinity of at least 10⁻⁷ M; and/or ii) the ratio of the binding affinity of a control T-cell modulatory multimeric polypeptide, wherein the control comprises a wild-type immunomodulatory polypeptide, to a cognate co-immunomodulatory polypeptide to the binding affinity of the T-cell modulatory multimeric polypeptide comprising a variant of the wild-type immunomodulatory polypeptide to the cognate co-immunomodulatory polypeptide, when measured by bio-layer interferometry, is in a range of from 1.5:1 to 10⁶:1.

[0606] Aspect 3. A T-cell modulatory multimeric polypeptide of aspect 2, wherein: a) the T-cell modulatory multimeric polypeptide binds to the first cell with an affinity that is at least 50%, at least 2-fold, at least 5-fold, or at least 10-fold higher than the affinity with which it binds the second T cell; and/or b) the variant immunomodulatory polypeptide binds the co-immunomodulatory polypeptide with an affinity of from about 10⁻⁴ M to about 10⁻⁷M, from about 10⁻⁴ M to about 10⁻⁶M, from about 10⁻⁴ M to about 10⁻⁵ M; and/or c) wherein the ratio of the binding affinity of a control T-cell modulatory multimeric polypeptide, wherein the control comprises a wild-type immunomodulatory polypeptide, to a cognate co-immunomodulatory polypeptide to the binding affinity of the T-cell modulatory multimeric polypeptide comprising a variant of the wild-type immunomodulatory polypeptide to the cognate co-immunomodulatory polypeptide, when measured by bio-Layer interferometry, is at least 10:1, at least 50:1, at least 10²:1, or at least 10³:1.

[0607] Aspect 4. A T-cell modulatory multimeric polypeptide of any one of aspects 1-3, wherein the first or the second polypeptide comprises an immunoglobulin (Ig) Fc polypeptide.

[0608] Aspect 5. A T-cell modulatory multimeric polypeptide of aspect 4, wherein the Ig Fe polypeptide is an IgG1. Fc polypeptide.

[0609] Aspect 6. A T-cell modulatory multimeric polypeptide of aspect 5, wherein IgG1 Fe polypeptide comprises one or more amino acid substitutions selected from N297A, L234A, L235A, L234F, L235E, and P331S.

[0610] Aspect 7. A T-cell modulatory multimeric polypeptide of any one of aspects 1-6, wherein:

[0611] a1) the first polypeptide comprises, in order from N-terminus to C-terminus: i) the HPV peptide epitope; ii) the first WIC polypeptide; and iii) at least one immunomodulatory polypeptide; and b1) the second polypeptide comprises, in order from N-terminus to C-terminus: i) the second MEC polypeptide; and ii) an immunoglobulin (Ig) Fe polypeptide; or

[0612] a2) the first polypeptide comprises, in order from N-terminus to C-terminus: i) the HPV peptide epitope; and ii) the first MHC polypeptide; and b2) the second polypeptide comprises, in order from N-terminus to C-terminus: i) at least one immunomodulatory polypeptide; ii) the second MHC polypeptide; and iii) an Ig Fc polypeptide; or

[0613] a3) the first polypeptide comprises, in order from N-terminus to C-terminus: i) the HPV peptide epitope; and ii) the first MHC polypeptide; and b3) the second polypeptide comprises, in order from N-terminus to C-terminus: i) the second WIC polypeptide; and ii) an Ig Fc polypeptide; and iii) at least one immunomodulatory polypeptide; or

[0614] a4) the first polypeptide comprises, in order from N-terminus to C-terminus: i) the HPV peptide epitope; and ii) the first MHC polypeptide; and b4) the second polypeptide comprises, in order from N-terminus to C-terminus: i) the second MHC polypeptide; and ii) at least one immunomodulatory polypeptide; or

[0615] a5) the first polypeptide comprises, in order from N-terminus to C-terminus: i) the HPV peptide epitope; and ii) the first MHC polypeptide; and b5) a second polypeptide comprises, in order from N-terminus to C-terminus: i) at least one immunomodulatory polypeptide; and ii) the second MHC polypeptide; or

[0616] a6) the first polypeptide comprises, in order from N-terminus to C-terminus: i) the HPV peptide epitope; ii) the first MHC polypeptide; and iii) at least one immunomodulatory polypeptide; and b6) the second polypeptide comprises: i) the second MHC polypeptide.

[0617] Aspect 8. A T-cell modulatory multimeric polypeptide of any one of aspects 1-7, wherein the first polypeptide comprises a peptide linker between the ITV epitope and the first MHC polypeptide and/or wherein the second polypeptide comprises a peptide linker between the immunomodulatory polypeptide and the second MHC polypeptide.

[0618] Aspect 9. A T-cell modulatory multimeric polypeptide of aspect 8, wherein the peptide linker comprises the amino acid sequence (GGGGS)n (SEQ 11) NO: 284), where n is an integer from 1 to 10.

[0619] Aspect 10. A T-cell modulatory multimeric polypeptide of any one of aspects 1-9, wherein the first MHC polypeptide is a fit-microglobulin polypeptide; and wherein the second MHC polypeptide is an MHC class I heavy chain polypeptide.

[0620] Aspect 11. A T-cell modulatory multimeric polypeptide of any one of aspects 1-10, wherein the at least one immunomodulatory polypeptide is selected from the group consisting of a cytokine (e.g., an IL2 polypeptide, an IL7 polypeptide, an IL12 polypeptide, an IL15 polypeptide, an IL17 polypeptide, an IL21 polypeptide, an IL27 polypeptide, an IL-23 polypeptide, a TGFβ polypeptide, and the like; and including all family members, e.g., IL17A, IL-17B, IL-17C, IL-17D, IL-17E, IL-17F, IL-17E), a 4-1BBL polypeptide, an LCOS-L polypeptide, an OX-40L polypeptide, a CD80 polypeptide, a CD86 polypeptide, a CD40 polypeptide, a CD70 polypeptide, a JAG1 (CD339) polypeptide, an ICAM (CD540 polypeptide, a PD-L1 polypeptide, a FasL polypeptide, a PD-L2 polypeptide, a PD-Ill (VISTA) polypeptide, an ICOS-L (CD275) polypeptide, a GITRL polypeptide, an HVEM polypeptide, a CXCL10 polypeptide, a CXCL9 polypeptide, a CXCL11 polypeptide, a CXCL13 polypeptide, and a CX3CL1 polypeptide, a Galectin-9 polypeptide, a CD83 polypeptide, a CD30L polypeptide, a HLA-C1 polypeptide, a MICA polypeptide, a MICB polypeptide, a HVEM (CD270) polypeptide, a lymphotoxin beta receptor polypeptide, a 3/TR6 polypeptide, an ILT3 polypeptide, an ILT4 polypeptide, a CXCL10 polypeptide, a CXCL9 polypeptide, a CXCL11 polypeptide, a CXCL13 polypeptide, and a CX3CL1 polypeptide, and combinations thereof.

[0621] Aspect 12. A T-cell modulatory multimeric polypeptide of any one of aspects 1-11, wherein the at least one immunomodulatory polypeptide is an IL-2 polypeptide.

[0622] Aspect 13. A T-cell modulatory multimeric polypeptide of any one of aspects 1-12, wherein the multimeric polypeptide comprises at least two immunomodulatory polypeptides, and wherein at least two of the immunomodulatory polypeptides are the same.

[0623] Aspect 14. A T-cell modulatory multimeric polypeptide of aspect 13, wherein the 2 or more immunomodulatory polypeptides are in tandem.

[0624] Aspect 15. A T-cell modulatory multimeric polypeptide of any one of aspects 1-14, wherein the first polypeptide and the second polypeptide are covalently linked to one another.

[0625] Aspect 16. A T-cell modulatory multimeric polypeptide of aspect 15, wherein the covalent linkage is via a disulfide bond.

[0626] Aspect 17. A T-cell modulatory multimeric polypeptide of any one of aspects 1-16, wherein the first MHC polypeptide or a linker between the epitope and the first MHC polypeptide comprises an amino acid substitution to provide a first Cys residue, wherein the second MHC polypeptide comprises an amino acid substitution to provide a second Cys residue, and wherein the disulfide linkage is between the first and the second Cys residues.

[0627] Aspect 18. A T-cell modulatory multimeric polypeptide of any one of aspects 1-17, wherein the HPV peptide epitope has a length of from about 4 amino acids to about 25 amino acids.

[0628] Aspect 19. A T-cell modulatory multimeric polypeptide of any one of aspects 1-18, wherein the HPV peptide epitope is E6 18-26 (KLPQLCTEL; SEQ ID NO:489); E6 26-34 (LQTTIHDII; SEQ ID NO:472); E6 49-57 (VYDFAFRDL; SEQ ID NO:473); E6 52-60 (FAFRDLCIV; SEQ ID NO:474); E6 75-83 (KFYSKISEY; SEQ ID NO:475); E6 80-88 (ISEYRHYCY; SEQ ID NO:476); E7 7-15 (TLHEYMLDL; SEQ ID NO:477); E7 11-19 (YMLDLQPET; SEQ ID NO:478); E7 44-52 (QAEPDRAHY; SEQ ID NO:479); E7 49-57 (RAI-IYNIVTF (SEQ ID NO:480); E7 61-69 (CDSTLRLCV; SEQ ID NO:481); and E7 67-76 (LCVQSTHVDI; SEQ ID NO:482); E7 82-90 (ELMGTEGIV; SEQ ID NO:483); E7 86-93 (TLGIVCPI; SEQ ID NO:484); or E7 92-93 (LLMOTLGIVCPI; SEQ ID NO:485).

[0629] Aspect 20. A T-cell modulatory multimeric polypeptide of any one of aspects 1-18, wherein the HPV peptide epitope comprises the HPV E6 amino acid sequence VYDEAFRDL (SEQ ID NO:486).

[0630] Aspect 21. A T-cell modulatory multimeric polypeptide of any one of aspects 1-18, wherein the HPV peptide comprises an HPV E7 amino acid sequence selected from the group consisting of: RAHYNIVTF (SEQ ID NO:505); CDSTLRLCV (SEQ ID NO:481); and LCVQSTHVDI (SEQ ID NO:482).

[0631] Aspect 22. A T-cell modulatory multimeric polypeptide of any one of aspects 1-21, wherein the first or the second WIC polypeptide comprises: a) an amino acid sequence having at least 95% amino acid sequence identity to the HLA-A*0101, HLA-A*0201, HLA-A*0201, HLA-A*1101, HLA-A*230I, HLA-A*2402, HLA-A*2407, HLA-A*3303, or HLA-A*3401 amino acid sequence depicted in FIG. 9A; or h) an amino acid sequence having at least 95% amino acid sequence identity to the HLA-B*0702, HLA-B*0801, HLA-B*1502, HLA-B*3802, HLA-B*4001, HLA-B*4601, or HLA-B*5301 amino acid sequence depicted in FIG. 10A; or c) an amino acid sequence having at least 95% amino acid sequence identity to the HLA-C*0102, HLA-C*0303, HLA-C*0304, HLA-C*0401, HLA-C*0602, HLA-C*0701, HLA-C*0702, HLA-C*0801, or HLA-C*1502 depicted in FIG. 11A.

[0632] Aspect 23. A T-cell modulatory multimeric polypeptide of any one of aspects 1-21, wherein the first MHC polypeptide is a β2M polypeptide, and wherein the second WIC polypeptide comprises an amino acid sequence having at least 95% amino acid sequence identity to an HLA-A*2402 polypeptide.

[0633] Aspect 24. A T-cell modulatory multimeric polypeptide of any one of aspects 1-21, wherein the first MHC polypeptide is a β2M polypeptide, and wherein the second MHC polypeptide is an HLA-A*1101 polypeptide.

[0634] Aspect 25. A T-cell modulatory multimeric polypeptide of any one of aspects 1-21, wherein the first MHC polypeptide is a β2M polypeptide, and wherein the second MHC polypeptide comprises an amino acid sequence having at least 95% amino acid sequence identity to an HLA-A*3303 polypeptide.

[0635] Aspect 26. A T-cell modulatory multimeric polypeptide of any one of aspects 1-21, wherein the first MHC polypeptide is a β2M polypeptide, and wherein the second MHC polypeptide comprises an amino acid sequence having at least 95% amino acid sequence identity to an HLA-A*0201 polypeptide.

[0636] Aspect 27. A T-cell modulatory multimeric polypeptide of any one of aspects 22-26, wherein the MHC heavy chain polypeptide comprises a Cys at position 236.

[0637] Aspect 28. A T-cell modulatory multimeric polypeptide of any one of aspects 22-27, wherein the β2M polypeptide comprises a Cys at position 12.

[0638] Aspect 29. A T-cell modulatory multimeric polypeptide of any one of aspects 1-28, wherein the immunomodulatory polypeptide is a variant IL-2 polypeptide comprising: i) an H16A substitution and an F42A substation; or ii) an H16T substitution and an F42A substitution.

[0639] Aspect 30. A T-cell modulatory multimeric polypeptide of any one of aspects 1-29, wherein the multimeric polypeptide comprises a first and a second heterodimer, and wherein the first and second heterodimers are covalently bound by one or more disulfide bonds between the Ig Fc polypeptides of the first and second heterodimers.

[0640] Aspect 31. A nucleic acid comprising a nucleotide sequence encoding a first or second polypeptide according to any one of aspects 1-28, wherein the first or second polypeptide comprises at least one immunomodulatory domain.

[0641] Aspect 32. A recombinant expression vector comprising the nucleic acid of aspect 31.

[0642] Aspect 33. A method of selectively modulating the activity of T cell specific for a human papillomavirus (HPV) epitope, the method comprising contacting the T cell with a T-cell modulatory multimeric polypeptide according to any one of aspects 1-30, wherein said contacting selectively modulates the activity of the HPV epitope-specific T cell.

[0643] Aspect 34. A method of treating a patient having a cancer, the method comprising administering to the patient an effective amount of a pharmaceutical composition comprising I-cell modulatory multimeric polypeptide according to any one of aspects 1-30.

[0644] Aspect 35. The method of aspect 34, wherein the cancer is cervical cancer, prostate cancer, or ovarian cancer.

[0645] Aspect 36. The method of aspect 34 or 35, wherein said administering is intramuscular.

[0646] Aspect 37. The method of aspect 34 or 35, wherein said administering is intravenous.

[0647] Aspect 38. A method of modulating an immune response in an individual, the method comprising administering to the individual an effective amount of the T-cell modulatory multimeric polypeptide (TMMP) of any one of aspects 1-30, wherein said administering induces an epitope-specific T cell response (e.g., a T cell response specific for the HPV epitope present in the TMMP) and an epitope-non-specific T cell response, wherein the ratio of the epitope-specific T cell response to the epitope-non-specific T cell response is at least 2:1.

[0648] Aspect 39. The method of aspect 38, wherein the ratio of the epitope-specific T cell response to the epitope-non-specific T cell response is at least 5:1.

[0649] Aspect 40. The method of aspect 38, wherein the ratio of the epitope-specific T cell response to the epitope-non-specific T cell response is at least 10:1.

[0650] Aspect 41. The method of aspect 38, wherein the ratio of the epitope-specific T cell response to the epitope-non-specific T cell response is at least 25:1.

[0651] Aspect 42. The method of aspect 38, wherein the ratio of the epitope-specific T cell response to the epitope-non-specific T cell response is at least 50:1.

[0652] Aspect 43. The method of aspect 38, wherein the ratio of the epitope-specific cell response to the epitope-non-specific T cell response is at least 100:1.

[0653] Aspect 44. The method of any one of aspects 38-43, wherein the individual is a human.

[0654] Aspect 45. The method of any one of aspects 38-44, wherein said modulating comprises increasing a cytotoxic T-cell response to a cancer cell (e.g., an HPV-expressing cancer cell).

[0655] Aspect 46. The method of any one of aspects 38-45, wherein said administering is intravenous, subcutaneous, intramuscular, systemic, intralymphatic, distal to a treatment site, local, or at or near a treatment site.

[0656] Aspect 47. The method of any one of aspects 38-46, wherein the epitope non-specific T-cell response is less than the epitope non-specific T-cell response that would be induced by a control T-cell modulatory multimeric polypeptide comprising a corresponding wild-type immunomodulatory polypeptide.

[0657] Aspect 48. A method of delivering a costimulatory (i.e., immunomodulatory) polypeptide selectively to target T cell, the method comprising contacting a mixed population of T cells with a T-cell modulatory multimeric polypeptide (TMMP) of any one of aspects 1-30, wherein the mixed population of T cells comprises the target T cell and non-target T cells, wherein the target T cell is specific for the epitope present within the TMMP (e.g., wherein the target T cell is specific for the HPV epitope present within the TMMP), and wherein said contacting delivers the one or more costimulatory polypeptides present within the TMMP to the target T cell.

[0658] Aspect 49. The method of aspect 48, wherein the population of T cells is in vitro.

[0659] Aspect 50. The method of aspect 48, wherein the population of T cells is in vivo in an individual.

[0660] Aspect 51. The method of aspect 50, comprising administering the multimeric polypeptide to the individual.

[0661] Aspect 52. The method of any one of aspects 48-51, wherein the target T cell is a cytotoxic T cell.

[0662] Aspect 53. The method of aspect 43, wherein the mixed population of T cells is an in vitro population of mixed T cells obtained from an individual, and wherein said contacting results in activation and/or proliferation of the target T cell, generating a population of activated and/or proliferated target T cells.

[0663] Aspect 54. The method of aspect 53, further comprising administering the population of activated and/or proliferated target T cells to the individual.

[0664] Aspect 55. A method of detecting, in a mixed population of T cells obtained from an individual, the presence of a target T cell that binds an HPV epitope of interest, the method comprising: a) contacting in vitro the mixed population of T cells with T-cell modulatory multimeric polypeptide (TMMP) of any one of aspects 1-30, wherein the TMMP comprises the HPV epitope of interest; and b) detecting activation and/or proliferation of T cells in response to said contacting, wherein activated and/or proliferated T cells indicates the presence of the target T cell.

[0665] Aspect 56. A T-cell modulatory multimeric polypeptide comprising: at least one heterodimer comprising: a) a first polypeptide comprising: i) a human papilloma virus (HPV) peptide epitope, wherein the HPV peptide has a length of from about 4 amino acids to about 25 amino acids; and ii) first major histocompatibility complex (MHC) class I polypeptide; b) a second polypeptide comprising a second MHC class I polypeptide, and c) at least one immunomodulatory polypeptide, wherein the first and/or the second polypeptide comprises the immunomodulatory polypeptide, wherein the first and the second polypeptides are covalently linked to one another via at least 2 disulfide bonds.

[0666] Aspect 57. A T-cell modulatory multimeric polypeptide of aspect 56, wherein at least one of the at least one immunomodulatory polypeptides is a variant immunomodulatory polypeptide that exhibits reduced affinity to a cognate co-immunomodulatory polypeptide compared to the affinity of a corresponding wild-type immunomodulatory polypeptide for the cognate co-immunomodulatory polypeptide, and wherein the epitope binds to a T-cell receptor (TCR) on a T cell with an affinity of at least 10⁻⁷ M, such that: i) the T-cell modulatory multimeric polypeptide binds to a first T cell with an affinity that is at least 25% higher than the affinity with which the T-cell modulatory multimeric polypeptide binds a second T cell, wherein the first T cell expresses on its surface the cognate co-immunomodulatory polypeptide and a TCR that binds the epitope with an affinity of at least 10⁻⁷M, and wherein the second T cell expresses on its surface the cognate co-immunomodulatory polypeptide but does not express on its surface a TCR that binds the epitope with an affinity of at least 10⁻⁷ M; and/or ii) the ratio of the binding affinity of a control T-cell modulatory multimeric polypeptide, wherein the control comprises a wild-type immunomodulatory polypeptide, to a cognate co-immunomodulatory polypeptide to the binding affinity of the T-cell modulatory multimeric polypeptide comprising a variant of the wild-type immunomodulatory polypeptide to the cognate co-immunomodulatory polypeptide, when measured by bio-layer interferometry, is in a range of from 1.5:1 to 10⁶:1.

[0667] Aspect 58. A T-cell modulatory multimeric polypeptide of aspect 57, wherein: a) the T-cell modulatory multimeric polypeptide binds to the first T cell with an affinity that is at least 50%, at least 2-fold, at least 5-fold, or at least 10-fold higher than the affinity with which it binds the second T cell; and/or b) the variant immunomodulatory polypeptide binds the co-immunomodulatory polypeptide with an affinity of from about 10⁻⁴ M to about 10⁻⁷M, from about 10⁻⁴ M to about 10⁻⁶ M, from about 10⁻⁴ M to about 10⁻⁵ M; and/or c) wherein the ratio of the binding affinity of a control T-cell modulatory multimeric polypeptide, wherein the control comprises a wild-type immunomodulatory polypeptide, to a cognate co-immunomodulatory polypeptide to the binding affinity of the T-cell modulatory multimeric polypeptide comprising a variant of the wild-type immunomodulatory polypeptide to the cognate co-immunomodulatory polypeptide, when measured by bio-layer interferometry, is at least 10:1, at least 50:1, at least 10²:1, or at least 10³:1.

[0668] Aspect 59. A T-cell modulatory multimeric polypeptide of any one of aspects 56-58, wherein the first or the second polypeptide comprises an immunoglobulin (Ig) Fe polypeptide.

[0669] Aspect 60. A T-cell modulatory multimeric polypeptide of aspect 59, wherein the Ig Fe polypeptide is an IgG1 Fe polypeptide.

[0670] Aspect 61. A T-cell modulatory multimeric polypeptide of aspect 60, wherein IgG1 Fc polypeptide comprises one or more amino acid substitutions selected from N297A, L234A, L235A, L234F, L235E, and P331S.

[0671] Aspect 62. A T-cell modulatory multimeric polypeptide of any one of aspects 56-61, wherein

a1) the first polypeptide comprises, in order from N-terminus to C-terminus:

[0672] i) the HPV peptide epitope;

[0673] ii) the first class 1 MHC polypeptide; and

[0674] iii) at least one immunomodulatory polypeptide; and

b1) the second polypeptide comprises, in order from N-terminus to C-terminus:

[0675] i) the second class I MHC polypeptide; and

[0676] ii) an immunoglobulin (Ig) Fe polypeptide; or

a2) the first polypeptide comprises, in order from N-terminus to C-terminus:

[0677] i) the HPV peptide epitope; and

[0678] ii) the first class I MHC polypeptide; and

b2) the second polypeptide comprises, in order from N-terminus to C-terminus:

[0679] i) at least one immunomodulatory polypeptide;

[0680] ii) the second class I MHC polypeptide; and

[0681] iii) an Ig Fe polypeptide; or

a3) the first polypeptide comprises, in order from N-terminus to C-terminus:

[0682] i) the HPV peptide epitope; and

[0683] ii) the first class 1 MHC polypeptide; and

b3) the second polypeptide comprises, in order from N-terminus to C-terminus:

[0684] i) the second class I MHC polypeptide; and

[0685] ii) an Ig Fc polypeptide; and

[0686] iii) at least one immunomodulatory polypeptide; or

a4) the first polypeptide comprises, in order from N-terminus to C-terminus:

[0687] i) the HPV peptide epitope; and

[0688] ii) the first class I MHC polypeptide; and

b4) the second polypeptide comprises, in order from N-terminus to C-terminus:

[0689] i) the second class I MHC polypeptide; and

[0690] ii) at least one immunomodulatory polypeptide; or

a5) the first polypeptide comprises, in order from N-terminus to C-terminus:

[0691] i) the HPV peptide epitope; and

[0692] ii) the first class I MHC polypeptide; and

b5) a second polypeptide comprises, in order from N-terminus to C-terminus:

[0693] i) at least one immunomodulatory polypeptide; and

[0694] ii) the second class I MHC polypeptide; or

a6) the first polypeptide comprises, in order from N-terminus to C-terminus:

[0695] i) the HPV peptide epitope;

[0696] ii) the first class I MHC polypeptide; and

[0697] iii) at least one immunomodulatory polypeptide; and

b6) the second polypeptide comprises:

[0698] i) the second class I MHC polypeptide.

[0699] Aspect 63. A T-cell modulatory multimeric polypeptide of any one of aspects 56-62, wherein the first MHC polypeptide is a 132-microglobulin polypeptide; and wherein the second MHC polypeptide is an MHC class I heavy chain polypeptide.

[0700] Aspect 64. A T-cell modulatory multimeric polypeptide of any one of aspects 46-63, wherein the at least one immunomodulatory polypeptide is selected from the group consisting of a cytokine (e.g., an IL2 polypeptide, an IL7 polypeptide, an IL12 polypeptide, an IL15 polypeptide, an IL17 polypeptide, an IL21 polypeptide, an IL27 polypeptide, an IL-23 polypeptide, a TGFβ polypeptide, and the like; and including all family members, e.g., IL17A, IL-17B, IL-17C, IL-170, IL-17E, IL-17F, IL-17E), a 4-1 BBL polypeptide, an ICOS-L polypeptide, an OX-40L polypeptide, a CD80 polypeptide, a CD86 polypeptide, a CD40 polypeptide, a CD70 polypeptide, a JAG1 (CD339) polypeptide, an ICAM (CD540 polypeptide, a PD-L1 polypeptide, a FasL polypeptide, a PD-L2 polypeptide, a PD-1H (VISTA) polypeptide, an LCOS-L (CD275) polypeptide, a GITRL polypeptide, an HVEM polypeptide, a CXCL10 polypeptide, a CXCL9 polypeptide, a CXCL11 polypeptide, a CXCL13 polypeptide, and a CX3CL1 polypeptide, a Galectin-9 polypeptide, a CD83 polypeptide, a CD30L polypeptide, a HLA-G polypeptide, a MICA polypeptide, a M1CB polypeptide, a HVEM (CD270) polypeptide, a lymphotoxin beta receptor polypeptide, a 3/TR6 polypeptide, an 11 . . . T3 polypeptide, an ILT4 polypeptide, a CXCL10 polypeptide, a CXCL9 polypeptide, a CXCL11 polypeptide, a CXCL13 polypeptide, and a CX3CL1 polypeptide, and combinations thereof.

[0701] Aspect 65. A T-cell modulatory multimeric polypeptide of any one of aspects 55-63, wherein the at least one immunomodulatory polypeptide is an IL-2 polypeptide.

[0702] Aspect 66. A T-cell modulatory multimeric polypeptide of any one of aspects 55-65, wherein the multimeric polypeptide comprises at least two immunomodulatory polypeptides, and wherein at least two of the immunomodulatory polypeptides are the same.

[0703] Aspect 67. A T-cell modulatory multimeric polypeptide of aspect 66, wherein the 2 or more immunomodulatory polypeptides are in tandem.

[0704] Aspect 68. The T-cell modulatory multimeric polypeptide of any one of aspects 46-67, wherein: a) a first disulfide bond is between: i) a Cys present in a linker between the HPV peptide epitope and the first MHC class I polypeptide, wherein the first MHC class I polypeptide is a132M polypeptide; and ii) a Cys residue introduced via a Y84C substitution in the second MHC class I polypeptide, wherein the second MHC class I polypeptide is a MHC Class I heavy chain polypeptide; and h) a second disulfide bond is between: i) a Cys residue introduced into the β2M polypeptide via an R12C substitution; and ii) a Cys residue introduced into the MHC Class I heavy chain polypeptide via an A236C substitution.

[0705] Aspect 69. A T-cell modulatory multimeric polypeptide of aspect 68, wherein the linker comprises the amino acid sequence GCGGS (SEQ ID NO:318).

[0706] Aspect 70. A T-cell modulatory multimeric polypeptide of aspect: 69, wherein the linker comprises the amino acid sequence GCGGS(GGGGS)n (SEQ ID NO: 342), where n is an integer from 1 to 10.

[0707] Aspect 71. A T-cell modulatory multimeric polypeptide of any one of aspects 56-70, wherein the HPV peptide epitope has a length of from about 4 amino acids to about 15 amino acids.

[0708] Aspect 72. A T-cell modulatory multimeric polypeptide of any one of aspects 56-71, wherein the HPV peptide epitope comprises an amino acid sequence selected from E6 18-26 (KLPQLCTEL; SEQ ID NO:489); E6 26-34 (LQTTIHDII; SEQ ID NO:472); E6 49-57 (VYDFAFRDL; SEQ ID NO:473); E6 52-60 (FAFRDLCIV; SEQ ID NO:474); E6 75-83 (KFYSKISEY; SEQ ID NO:475); E6 80-88 (ISEYRHYCY; SEQ ID NO:476); E7 7-15 (TLHEYMLDL; SEQ ID NO:477); E7 11-19 (YMLDLQPET; SEQ ID NO:478); E7 44-52 (QAEPDRAHY; SEQ ID NO:479); E7 49-57 (RAHYNIVTF (SEQ ID NO:480); E7 61-69 (CDSTLRLCV; SEQ ID NO:481); and E7 67-76 (LCVQSTHVDI; SEQ ID NO:482); E7 82-90 (LLMGTLGIV; SEQ ID NO:483); E7 86-93 (TLGIVCPI; SEQ ID NO:484); or E7 92-93 (LLMGTLGIVCPI; SEQ ID NO:485).

[0709] Aspect 73. A T-cell modulatory multimeric polypeptide of any one of aspects 56-71, wherein the HPV peptide comprises: a) the HPV E6 amino acid sequence VYDFAFRDL (SEQ ID NO:486); or h) an NPV E7 amino acid sequence selected from: RAHYNIVTF (SEQ ID NO:505); CDSTLRLCV (SEQ ID NO:481); and LCVQSTHVDI (SEQ ID NO:482).

[0710] Aspect 74. A T-cell modulatory multimeric polypeptide of any one of aspects 56-73, wherein the first or the second MHC class I polypeptide comprises: a) an amino acid sequence having at least 95% amino acid sequence identity to the HLA-A*0101, HLA-A*0201, HLA-A*1101, HLA-A*230I, HLA-A*2402, HLA-A*2407, HLA-A*3303, or HLA-A*340I amino acid sequence depicted in FIG. 9A; or b) an amino acid sequence having at least 95% amino acid sequence identity to the HLA-B*0702, HLA-B*0801, HLA-B*1502, HLA-B*3802, HLA-B*4001, HLA-B*4601, or HLA-B*5301 amino acid sequence depicted in FIG. 10A; or c) an amino acid sequence having at least 95% amino acid sequence identity to the HLA-C*0102, HLA-C*0303, HLA-C*0304, HLA-C*0401, HLA-C*0602, HLA-C*0701, HLA-C*0702, HLA-C*0801, or HLA-C*1502 depicted in FIG. 11A.

[0711] Aspect 75. A T-cell modulatory multimeric polypeptide of any one of aspects 56-74, wherein the first MHC polypeptide is a β2M polypeptide, and wherein the second MHC polypeptide comprises an amino acid sequence having at least 95% amino acid sequence identity to an HLA-A*2402 polypeptide.

[0712] Aspect 76. A T-cell modulatory multimeric polypeptide of any one of aspects 56-74, wherein the first WIC polypeptide is a β2M polypeptide, and wherein the second MHC polypeptide is an HLA-A*1101 polypeptide.

[0713] Aspect 77. A T-cell modulatory multimeric polypeptide of any one of aspects 56-74, wherein the first WIC polypeptide is a β2M polypeptide, and wherein the second MHC polypeptide comprises an amino acid sequence having at least 95% amino acid sequence identity to an HLA-A*3303 polypeptide.

[0714] Aspect 78. A T-cell modulatory multimeric polypeptide of any one of aspects 56-74, wherein the first MHC polypeptide is a β2M polypeptide, and wherein the second MHC polypeptide comprises an amino acid sequence having at least 95% amino acid sequence identity to an HLA-A*0201 polypeptide.

[0715] Aspect 79. A T-cell modulatory multimeric polypeptide of any one of aspects 56-78, wherein the at least one immunomodulatory polypeptide is a variant IL-2 polypeptide comprising: i) an H16A substitution and an F42A substation; or ii) an H16T substitution and an F42A substitution.

[0716] Aspect 80. A T-cell modulatory multimeric polypeptide of any one of aspects 56-79, wherein the multimeric polypeptide comprises a first and a second heterodimer.

[0717] Aspect 81. A nucleic acid comprising a nucleotide sequence encoding a first or second polypeptide according to any one of aspects 56-80, wherein the first or second polypeptide comprises at least one immunomodulatory domain.

[0718] Aspect 82. An expression vector comprising the nucleic acid of aspect 81.

[0719] Aspect 83. A method of selectively modulating the activity of T cell specific for a human papillomavirus (HPV) epitope, the method comprising contacting the T cell with a T-cell modulatory multimeric polypeptide according to any one of aspects 56-80, wherein said contacting selectively modulates the activity of the HPV epitope-specific T cell.

[0720] Aspect 84. A method of treating a patient having a cancer, the method comprising administering to the patient an effective amount of a pharmaceutical composition comprising T-cell modulatory multimeric polypeptide according to any one of aspects 56-80.

[0721] Aspect 85. The method of aspect 84, wherein the cancer is cervical cancer, prostate cancer, or ovarian cancer.

[0722] Aspect 86. The method of aspect 84 or 85, wherein said administering is intramuscular.

[0723] Aspect 87. The method of aspect 84 or 85, wherein said administering is intravenous.

[0724] Aspect 88. A method of any one of aspects 84-87, further comprising administering one or more checkpoint inhibitors to the individual.

[0725] Aspect 89. A method according to aspect 88, wherein the checkpoint inhibitor is an antibody that binds to a polypeptide selected from the group consisting of CD27, CD28, CD40, CD122, CD96, CD73, CD47, OX40, GITR, CSFIR, JAK, PI3K delta, PI3K gamma, TAM, arginase, CD137, ICOS, A2AR, B7-113, B7-H4, BTLA, CTLA-4, LAG3, TIM3, VISTA, CD96, TIGIT, CD122, PD-1, PD-L1, and PD-L2.

[0726] Aspect 90. A method according to aspect 89, wherein the checkpoint inhibitor is an antibody specific for PD-1, PD-L1, or CTLA4.

[0727] Aspect 91. A method according to aspect 88, wherein the one or more checkpoint inhibitors is selected from the group consisting of nivolumab, pembrolizumab, pidilizumab, AMP-224, MPDL3280A, MDX-1105, MEDT-4736, arelumab, ipilimumab, tremelimumab, pidilizumab, 1MP321, MGA271, BMS-986016, lirilumab, urelumab, PF-05082566, IPH2101, MEDI-6469, CP-870,893, Mogamulizumab, Varlilumab, Avelumab, Galiximab, AMP-514, AUNP 12, Indoximod, NLG-919, INCB024360, KN035, and combinations thereof.

[0728] Aspect 92. A method of modulating an immune response in an individual, the method comprising administering to the individual an effective amount of the T-cell modulatory multimeric polypeptide of any one of aspects 56-80, wherein said administering induces an epitope-specific T cell response and an epitope-non-specific T cell response, wherein the ratio of the epitope-specific T cell response to the epitope-non-specific T cell response is at least 2:1.

[0729] Aspect 93. A method of delivering an immunomodulatory polypeptide selectively to a target T cell, the method comprising contacting a mixed population of T cells with a T-cell modulatory multimeric polypeptide of any one of aspects 56-80, wherein the mixed population of T cells comprises the target T cell and non-target T cells, wherein the target T cell is specific for the HPV epitope present within the T-cell modulatory multimeric polypeptide, and wherein said contacting delivers the one or more immunomodulatory polypeptides present within the T-cell modulatory multimeric polypeptide to the target T cell.

[0730] Aspect 94. A method of detecting, in a mixed population of T cells obtained from an individual, the presence of a target T cell that binds an HPV epitope, the method comprising: a) contacting in vitro the mixed population of T cells with the T-cell modulatory multimeric polypeptide of any one of aspects 56-80, wherein the T-cell modulatory multimeric polypeptide comprises the HPV epitope; and h) detecting activation and/or proliferation of T cells in response to said contacting, wherein activated and/or proliferated T cells indicates the presence of the target T cell.

### Aspects Set B

[0731] Aspects, including embodiments, of the present subject matter described above may be beneficial alone or in combination, with one or more other aspects or embodiments. Without limiting the foregoing description, certain non-limiting aspects of the disclosure numbered 1-36 are provided below. As will be apparent to those of skill in the art upon reading this disclosure, each of the individually numbered aspects may be used or combined with any of the preceding or following individually numbered aspects. This is intended to provide support for all such combinations of aspects and is not limited to combinations of aspects explicitly provided below:

[0732] Aspect 1. A T-cell modulatory multimeric polypeptide comprising:

[0733] at least one heterodimer comprising:

[0734] a) a first polypeptide comprising:
[0735] i) a human papilloma virus (HPV) peptide epitope, wherein the HPV peptide has a length of at least 4 amino acids; and
[0736] ii) first major histocompatibility complex (WIC) polypeptide;

[0737] b) a second polypeptide comprising a second MHC polypeptide, and

[0738] c) at least one immunomodulatory polypeptide,

[0739] wherein the first and/or the second polypeptide comprises the immunomodulatory polypeptide,

[0740] wherein the HPV peptide epitope is E6 18-26 (KLPQLCTEL; SEQ ID NO:471); E6 26-34 (LQTTIHDII; SEQ ID NO:472); E6 49-57 (VYDFAFRDL; SEQ ID NO:473); E6 52-60 (FAFRDLCIV; SEQ ID NO:474); E6 75-83 (KFYSKISEY; SEQ ID NO:475); E6 80-88 (ISEYRHYCY; SEQ ID NO:476); E7 7-15 (TLHEYMLDL; SEQ ID NO:477); E7 11-19 (YMLDLQPET; SEQ ID NO:478); E7 44-52 (QAEPDRAHY; SEQ ID NO:479); E7 49-57 (RAHYNIVTF (SEQ ID NO:480); E7 61-69 (CDSTLRLCV; SEQ ID NO:481); and E7 67-76 (LCVQSTHVDI; SEQ ID NO:482); E7 82-90 (LLMGTLGIV; SEQ ID NO:483); E7 86-93 (TLGIVCPI; SEQ ID NO:484); or E7 92-93 (LLMGTLGIVCPI; SEQ ID NO:485), optionally wherein the first or the second polypeptide comprises an immunoglobulin (Ig) Fc polypeptide.

[0741] Aspect 2. A T-cell modulatory multimeric polypeptide of aspect 1, wherein at least one of the at least one immunomodulatory polypeptide is a variant immunomodulatory polypeptide that exhibits reduced affinity to a cognate co-immunomodulatory polypeptide compared to the affinity of a corresponding wild-type immunomodulatory polypeptide for the cognate co-immunomodulatory polypeptide, and wherein the epitope binds to a T-cell receptor (ICA) on a T cell with an affinity of at least 10⁻⁷ M, such that:

[0742] i) the T-cell modulatory multimeric polypeptide binds to a first cell with an affinity that is at least 25% higher than the affinity with which the T-cell modulatory multimeric polypeptide binds a second T cell, wherein the first T cell expresses on its surface the cognate co-immunomodulatory polypeptide and a TCR that binds the epitope with an affinity of at least 10⁻⁷M, and

[0743] wherein the second T cell expresses on its surface the cognate co-immunomodulatory polypeptide but does not express on its surface a TCR that binds the epitope with an affinity of at least 10⁻⁷ M; and/or

[0744] ii) the ratio of the binding affinity of a control T-cell modulatory multimeric polypeptide, wherein the control comprises a wild-type immunomodulatory polypeptide, to a cognate co-immunomodulatory polypeptide to the binding affinity of the T-cell modulatory multimeric polypeptide comprising a variant of the wild-type immunomodulatory polypeptide to the cognate co-immunomodulatory polypeptide, when measured by bio-layer interferometry, is in a range of from 1.5:1 to 10⁶:1.

[0745] Aspect 3. A T-cell modulatory multimeric polypeptide of aspect 2, wherein:

[0746] a) the T-cell modulatory multimeric polypeptide binds to the first T cell with an affinity that is at least 50%, at least 2-fold, at least 5-fold, or at least 10-fold higher than the affinity with which it binds the second T cell; and/or

[0747] h) the variant immunomodulatory polypeptide binds the co-immunomodulatory polypeptide with an affinity of from about 10⁻⁴ M to about 10⁻⁷ M, from about 10⁻⁴ M to about 10⁻⁶ M, from about 10⁻⁴ M to about 10⁻⁵ M; and/or

[0748] c) wherein the ratio of the binding affinity of a control T-cell modulatory multimeric polypeptide, wherein the control comprises a wild-type immunomodulatory polypeptide, to a cognate co-immunomodulatory polypeptide to the binding affinity of the T-cell modulatory multimeric polypeptide comprising a variant of the wild-type immunomodulatory polypeptide to the cognate co-immunomodulatory polypeptide, when measured by bio-layer interferometry, is at least 10:1, at least 50:1, at least 10²:1, or at least 10²:1.

[0749] Aspect 4. A T-cell modulatory multimeric polypeptide of any one of aspects 1-6, wherein

[0750] a1) the first polypeptide comprises, in order from N-terminus to C-terminus:
[0751] i) the HPV peptide epitope;
[0752] ii) the first MHC polypeptide; and
[0753] iii) at least one immunomodulatory polypeptide; and

[0754] b1) the second polypeptide comprises, in order from N-terminus to C-terminus:
[0755] i) the second MHC polypeptide; and
[0756] ii) an immunoglobulin (Ig) Fc polypeptide; or

[0757] a2) the first polypeptide comprises, in order from N-terminus to C-terminus:
[0758] i) the HPV peptide epitope; and
[0759] ii) the first MHC polypeptide; and

[0760] b2) the second polypeptide comprises, in order from N-terminus to C-terminus:
[0761] i) at least one immunomodulatory polypeptide;
[0762] ii) the second MHC polypeptide; and
[0763] iii) an Ig Fc polypeptide; or

[0764] a3) the first polypeptide comprises, in order from N-terminus to C-terminus:
[0765] i) the HPV peptide epitope; and
[0766] ii) the first MHC polypeptide; and

[0767] b3) the second polypeptide comprises, in order from N-terminus to C-terminus:
[0768] i) the second WIC polypeptide; and
[0769] ii) an Ig Fc polypeptide; and
[0770] iii) at least one immunomodulatory polypeptide; or

[0771] a4) the first polypeptide comprises, in order from N-terminus to C-terminus:
[0772] i) the HPV peptide epitope; and
[0773] ii) the first MHC polypeptide; and

[0774] b4) the second polypeptide comprises, in order from N-terminus to C-terminus:
[0775] i) the second MHC polypeptide; and
[0776] ii) at least one immunomodulatory polypeptide; or

[0777] a5) the first polypeptide comprises, in order from N-terminus to C-terminus:
[0778] i) the HPV peptide epitope; and
[0779] ii) the first MHC polypeptide; and

[0780] b5) a second polypeptide comprises, in order from N-terminus to C-terminus:
[0781] i) at least one immunomodulatory polypeptide; and
[0782] ii) the second MHC polypeptide; or

[0783] a6) the first polypeptide comprises, in order from N-terminus to C-terminus:
[0784] i) the HPV peptide epitope;
[0785] ii) the first MHC polypeptide: and
[0786] iii) at least one immunomodulatory polypeptide; and

[0787] b6) the second polypeptide comprises:
[0788] i) the second MHC polypeptide.

[0789] Aspect 5. A T-cell modulatory multimeric polypeptide of any one of aspects 1-4, wherein:

[0790] a) the first MHC polypeptide is a β2-microglobulin polypeptide; and the second MHC polypeptide is an WIC class I heavy chain polypeptide; or

[0791] b) the first MHC polypeptide is an MHC class I heavy chain polypeptide; and the second MHC polypeptide is a β2-microglobulin polypeptide.

[0792] Aspect 6. A T-cell modulatory multimeric polypeptide of aspect 5, wherein:

[0793] a) the first polypeptide comprises, in order from N-terminus to C-terminus:
[0794] i) the HPV peptide epitope; and
[0795] ii) the β2-microglobulin polypeptide; and

[0796] b) the second polypeptide comprises, in order from N-terminus to C-terminus:
[0797] i) at least one immunomodulatory polypeptide;
[0798] ii) the MHC class I heavy chain polypeptide; and
[0799] iii) an Ig Fc polypeptide.

[0800] Aspect 7. A T-cell modulatory multimeric polypeptide of aspect 5, wherein:

[0801] a) the first polypeptide comprises, in order from N-terminus to C-terminus:
[0802] i) the HPV peptide epitope; and
[0803] ii) the β2-microglobulin polypeptide; and

[0804] b) the second polypeptide comprises, in order from N-terminus to C-terminus:

[0805] i) the MHC class I heavy chain polypeptide; and

[0806] ii) an Ig Fc polypeptide; and

[0807] iii) at least one immunomodulatory polypeptide

[0808] Aspect 8. A T-cell modulatory multimeric polypeptide of any one of aspects 1-7, wherein the at least one immunomodulatory polypeptide is selected from the group consisting of a cytokine, a 4-1BBL polypeptide, an ICOS-L polypeptide, an OX-401, polypeptide, a CD80 polypeptide, a CD86 polypeptide, a CD40 polypeptide, a CD70 polypeptide, and combinations thereof.

[0809] Aspect 9. A T-cell modulatory multimeric polypeptide of any one of aspects 1-8, wherein the at least one immunomodulatory polypeptide is an IL-2 polypeptide.

[0810] Aspect 10. A T-cell modulatory multimeric polypeptide of any one of aspects 1-9, wherein the multimeric polypeptide comprises at least two immunomodulatory polypeptides, and wherein at least two of the immunomodulatory polypeptides are the same, optionally wherein the 2 or more immunomodulatory polypeptides are in tandem.

[0811] Aspect 11. A T-cell modulatory multimeric polypeptide of any one of aspects 1-10, wherein the immunomodulatory polypeptide is a variant IL-2 polypeptide that exhibits reduced affinity to an IL-2 receptor compared to the affinity of a wild-type IL-2 polypeptide fix the IL-2 receptor.

[0812] Aspect 12. A T-cell modulatory multimeric polypeptide of aspect 11, wherein the variant IL-2 polypeptide comprises: i) an H16A substitution and an F42A substitution; or ii) an H16T substitution and an F42A substitution.

[0813] Aspect 13. A T-cell modulatory multimeric polypeptide of any one of aspects 1-12, wherein the first polypeptide and the second polypeptide are covalently linked to one another, optionally wherein the covalent linkage is via a disulfide bond.

[0814] Aspect 14. A T-cell modulatory multimeric polypeptide of any one of aspects 1-13, wherein the first MHC polypeptide or a linker between the epitope and the first MHC polypeptide comprises an amino acid substitution to provide a first Cys residue, wherein the second MHC polypeptide comprises an amino acid substitution to provide a second Cys residue, and wherein the disulfide linkage is between the first and the second Cys residues.

[0815] Aspect 15. The T-cell modulatory multimeric polypeptide of any one of aspects 1-14, wherein the polypeptide comprises a disulfide bond between: i) a Cys present in a linker between the HPV peptide epitope and the first MHC class I polypeptide, wherein the first MHC class I polypeptide is a (QM polypeptide; and ii) a Cys residue introduced via a Y84C substitution in the second MHC class I polypeptide, wherein the second MHC class I polypeptide is a MHC Class 1 heavy chain polypeptide.

[0816] Aspect 16. The T-cell modulatory multimeric polypeptide of any one of aspects 1-14, wherein the polypeptide comprises a disulfide bond between i) a Cys residue introduced into the first MHC class I polypeptide via an R12C substitution, wherein the first MHC class I polypeptide is a β2M polypeptide; and ii) a Cys residue introduced into the second MHC class I polypeptide, via an A236C substitution, wherein second MHC class I polypeptide is an MHC Class I heavy chain polypeptide.

[0817] Aspect 17. The 1-cell modulatory multimeric polypeptide of any one of aspects 1-14, wherein the polypeptide comprises a first disulfide bond between: i) a Cys present in a linker between the HPV peptide epitope and the first WIC class I polypeptide, wherein the first MHC class I polypeptide is a β2M polypeptide; and ii) a Cys residue introduced via a Y84C substitution in the second MHC class I polypeptide, wherein the second MHC class I polypeptide is a MHC Class I heavy chain polypeptide, and a second disulfide bond between i) a Cys residue introduced into the β2M polypeptide via an R12C substitution; and ii) a Cys residue introduced into the WIC Class I heavy chain polypeptide via an A236C substitution.

[0818] Aspect 18. A T-cell modulatory multimeric polypeptide of aspect 15 or aspect 17, wherein the linker between the HPV peptide epitope and the first MHC is GCGGS(G4S)n (SEQ ID NO:315), where n is 1, 2, 3, 4, 5, 6, 7, 8, or 9.

[0819] Aspect 19. A T-cell modulatory multimeric polypeptide of any one of aspects 1-18, wherein the HPV peptide epitope has a length of from about 4 amino acids to about 25 amino acids.

[0820] Aspect 20. A T-cell modulatory multimeric polypeptide of any one of aspects 1-19, wherein the HPV peptide epitope comprises:

[0821] a) the HPV E6 amino acid sequence VYDFAFRDL (SEQ ID NO:486); or

[0822] b) an HPV E7 amino acid sequence selected from the group consisting of: RAHYNIVTF (SEQ ID NO:505); CDSTLRLCV (SEQ ID NO:481); and LCVQSTHVDI (SEQ ID NO:482).

[0823] Aspect 21. A T-cell modulatory multimeric polypeptide of any one of aspects 1-20, wherein the first or the second WIC polypeptide comprises:

[0824] a) an amino acid sequence having at least 95% amino acid sequence identity to the HLA-A*0101, HLA-A*0201, HLA-A*0201, HLA-A*1101, HLA-A*2301, HLA-A*2402, HLA-A*2407, HLA-A*3303, or HLA-A*3401 amino acid sequence depicted in FIG. 11A; or

[0825] b) an amino acid sequence having at least 95% amino acid sequence identity to the ICA-B*0702, HLA-B*0801, HLA-B*1502, HLA-B*3802, HLA-B*4001, HLA-B*4601, or HLA-B*5301 amino acid sequence depicted in FIG. 12A; or

[0826] c) an amino acid sequence having at least 95% amino acid sequence identity to the HLA-C*0102, HLA-C*0303, HLA-C*0304, HLA-C*0401, HLA-C*0602, HLA-C*0701, HLA-C*0702, HLA-C*0801, or HLA-C*1502 depicted in FIG. 13A.

[0827] Aspect 22. A T-cell modulatory multimeric polypeptide of any one of aspects 1-20, wherein the first MHC polypeptide is a β2M polypeptide, and wherein the second MHC polypeptide comprises an amino acid sequence having at least 95% amino acid sequence identity to an HLA*2402 polypeptide.

[0828] Aspect 23. A T-cell modulatory multimeric polypeptide of any one of aspects 1-20, wherein the first. MHC polypeptide is a β2M polypeptide, and wherein the second MHC polypeptide comprises an amino acid sequence having at least 95% amino acid sequence identity to an HLA-A*0201 polypeptide.

[0829] Aspect 24. A T-cell modulatory multimeric polypeptide of any one of aspects 1-23, wherein the multimeric polypeptide comprises a first and a second heterodimer, and wherein the first and second heterodimers are covalently hound by one or more disulfide bonds between the Ig Fe polypeptides of the first and second heterodimers.

[0830] Aspect 25. A nucleic acid comprising a nucleotide sequence encoding a first or second polypeptide according to any one of aspects 1-24.

[0831] Aspect 26. An expression vector comprising the nucleic acid of aspect 25.

[0832] Aspect 27. A method of selectively modulating the activity of T cell specific for human papillomavirus (HPV) epitope, the method comprising contacting the T cell with a T-cell modulatory multimeric polypeptide according to any one of aspects 1-24, wherein said contacting selectively modulates the activity of the HPV epitope-specific T cell.

[0833] Aspect 28, A method of treating a patient having a cancer, the method comprising administering to the patient an effective amount of a pharmaceutical composition comprising T-cell modulatory multimeric polypeptide according to any one of aspects 1-24.

[0834] Aspect 29. The method of aspect 28, wherein the cancer is cervical cancer, prostate cancer, or ovarian cancer.

[0835] Aspect 30. A method of aspect 28 or aspect 29, further comprising administering one or more checkpoint inhibitors to the individual.

[0836] Aspect 31. A method according to aspect 30, wherein the checkpoint inhibitor is an antibody that binds to a polypeptide selected from the group consisting of CD27, CD28, CD40, CD122, CD96. CD73, CD47, OX40, GITR, CSF1R, JAK, PI3K delta, PI3K gamma, TAM, arginase, CD137, ICOS, A2AR, B7-H3, B7414, BTLA, CTLA-4, LAG3, TIM3, VISTA, CD96, TIGIT, CD122, PD-1, PD-L1, and PD-L2.

[0837] Aspect 32. A method according to aspect 31, wherein the checkpoint inhibitor is an antibody specific for PD-1, PD-L1, or CTLA4.

[0838] Aspect 33. A method according to aspect 30, wherein the one or more checkpoint inhibitors is selected from the group consisting of nivolumab, pembrolizumab, pidilizumab, AMP-224, MPDL3280A, MDX-1105, MEDI-4736, arclumab, ipilimurnah, trcmclimumab, pidilizumab, IMP321, MGA271, BMS-986016, lirilumab, urelumab, PF-05082566, IPH2101, MEDI-6469, CP-870,893, Mogamulizumab, Varlilumab, Avelumab, Galiximab, AMP-514, AUNP 12, Indoximod, NLG-919, INCB024360, KN035, and combinations thereof.

[0839] Aspect 34. A method of modulating an immune response in an individual, the method comprising administering to the individual an effective amount of the T-cell modulatory multimeric polypeptide of any one of aspects 1-24,

[0840] wherein said administering induces an epitope-specific T cell response and an epitope-non-specific T cell response, and

[0841] wherein the ratio of the epitope-specific T cell response to the epitope-non-specific T cell response is at least 2:1.

[0842] Aspect 35. A method of delivering an immunomodulatory polypeptide selectively to a target T cell, the method comprising contacting a mixed population of T cells with a T-cell modulatory multimeric polypeptide of any one of aspects 1-24, wherein the mixed population of T cells comprises the target T cell and non-target T cells, wherein the target T cell is specific for the HPV epitope present within the T-cell modulatory multimeric polypeptide, and wherein said contacting delivers the one or more immunomodulatory polypeptides present within the T-cell modulatory multimeric polypeptide to the target T cell.

[0843] Aspect 36. A method of detecting, in a mixed population of T cells obtained from an individual, the presence of a target T cell that binds an HPV epitope, the method comprising:

[0844] a) contacting in vitro the mixed population of T cells with the T-cell modulatory multimeric polypeptide of any one of aspects 1-24, wherein the T-cell modulatory multimeric polypeptide comprises the HPV epitope; and

[0845] b) detecting activation and/or proliferation of T cells in response to said contacting, wherein activated and/or proliferated T cells indicates the presence of the target T cell.

[0846] While the present invention has been described with reference to the specific embodiments thereof, it should be understood by those skilled in the art that various changes may be made and equivalents may be substituted without departing from the true spirit and scope of the invention. In addition, many modifications may be made to adapt a particular situation, material, composition of matter, process, process step or steps, to the objective, spirit and scope of the present invention. All such modifications are intended to be within the scope of the claims appended hereto.

What is claimed is:

1. A T-cell modulatory multimeric polypeptide comprising:
at least one heterodimer comprising:
a) a first polypeptide comprising:
i) a human papilloma virus (HPV) peptide epitope, wherein the HPV peptide has a length of at least 4 amino acids; and
ii) first major histocompatibility complex (MHC) polypeptide;
b) a second polypeptide comprising a second MHC polypeptide, and
c) at least one immunomodulatory polypeptide,
wherein the first and/or the second polypeptide comprises the immunomodulatory polypeptide,
wherein the HPV peptide epitope is E6 18-26 (KLPQLCTEL; SEQ ID NO:471); E6 26-34 (LQTTIHDII; SEQ ID NO:472); E6 49-57 (VYDFAFRDL; SEQ ID NO:473); E6 52-60 (FAFRDLCIV; SEQ ID NO:474); E6 75-83 (KFYSKISEY; SEQ ID NO:475); E6 80-88 (ISEYRHYCY; SEQ ID NO:476); E7 7-15 (TLHEYMLDL; SEQ ID NO:477); E7 11-19 (YMLDLQPET; SEQ ID NO:478); E7 44-52 (QAEPDRAHY; SEQ ID NO:479); E7 49-57 (RAHYNIVTF (SEQ ID NO:480); E7 61-69 (CDSTLRLCV; SEQ ID NO:481); and E7 67-76 (LCVQSTHVDI; SEQ ID NO:482); E7 82-90 (LLMGTEGIV; SEQ ID NO:483); E7 86-93 (TLGIVCPI; SEQ ID NO:484); or E7 92-93 (LLMGTEGIVCPI; SEQ ID NO:485),
optionally wherein the first or the second polypeptide comprises an immunoglobulin (Ig) Fe polypeptide.

2. A T-cell modulatory multimeric polypeptide of claim 1, wherein at least one of the at least one immunomodulatory polypeptide is a variant immunomodulatory polypeptide that exhibits reduced affinity to a cognate co-immunomodulatory polypeptide compared to the affinity of a corresponding wild-type immunomodulatory polypeptide for the cognate co-immunomodulatory polypeptide, and wherein the epitope binds to a T-cell receptor (TCR) on a T cell with an affinity of at least 10⁻⁷ M, such that:
i) the T-cell modulatory multimeric polypeptide binds to a first T cell with an affinity that is at least 25% higher than the affinity with which the T-cell modulatory multimeric polypeptide binds a second T wherein the first T cell expresses on its surface the cognate co-immunomodulatory polypeptide and a TCR that binds the epitope with an affinity of at least 10⁻⁷M, and
wherein the second T cell expresses on its surface the cognate co-immunomodulatory polypeptide but does not express on its surface a TCR that binds the epitope with an affinity of at least 10⁻⁷ M; and/or
ii) the ratio of the binding affinity of a control T-cell modulatory multimeric polypeptide, wherein the control comprises a wild-type immunomodulatory polypeptide, to a cognate co-immunomodulatory polypeptide to the binding affinity of the T-cell modulatory multimeric polypeptide comprising a variant of the wild-type immunomodulatory polypeptide to the cognate co-immunomodulatory polypeptide, when measured by bio-layer interferometry, is in a range of from 1.5:1 to 10⁶:1.

3. A T-cell modulatory multimeric polypeptide of claim 2, wherein:
a) the T-cell modulatory multimeric polypeptide binds to the first T cell with an affinity that is at least 50%, at least 2-fold, at least 5-fold, or at least 10-fold higher than the affinity with which it binds the second T cell; and/or
b) the variant immunomodulatory polypeptide binds the co-immunomodulatory polypeptide with an affinity of from about 10⁻⁴ M to about 10⁻⁷ M, from about 10⁻⁴ M to about 10⁻⁶ M, from about 10⁻⁴ M to about 10⁻⁵ M; and/or
c) wherein the ratio of the binding affinity of a control T-cell modulatory multimeric polypeptide,
wherein the control comprises a wild-type immunomodulatory polypeptide, to a cognate co-immunomodulatory polypeptide to the binding affinity of the T-cell modulatory multimeric polypeptide comprising a variant of the wild-type immunomodulatory polypeptide to the cognate co-immunomodulatory polypeptide, when measured by bio-layer interferometry, is at least 10:1, at least 50:1, at least 10²:1, or at least 10³:1.

4. A T-cell modulatory multimeric polypeptide of any one of claims 1-3, wherein
a1) the first polypeptide comprises, in order from N-terminus to C-terminus:
i) the HPV peptide epitope;
ii) the first MHC polypeptide; and
iii) at least one immunomodulatory polypeptide; and
b1) the second polypeptide comprises, in order from N-terminus to C-terminus:
i) the second MHC polypeptide; and
ii) an immunoglobulin (Ig) Fc polypeptide; or
a2) the first polypeptide comprises, in order from N-terminus to C-terminus:
i) the HPV peptide epitope; and
ii) the first MHC polypeptide; and
b2) the second polypeptide comprises, in order from N-terminus to C-terminus:
i) at least one immunomodulatory polypeptide;
ii) the second MHC polypeptide; and
iii) an Ig Fc polypeptide; or
a3) the first polypeptide comprises, in order from N-terminus to C-terminus:
i) the HPV peptide epitope; and
ii) the first MHC polypeptide; and
b3) the second polypeptide comprises, in order from N-terminus to C-terminus:
i) the second WIC polypeptide; and
ii) an Ig Fc polypeptide; and
iii) at least one immunomodulatory polypeptide; or
a4) the first polypeptide comprises, in order from N-terminus to C-terminus:
i) the HPV peptide epitope; and
ii) the first MHC polypeptide; and
b4) the second polypeptide comprises, in order from N-terminus to C-terminus:
i) the second MHC polypeptide; and
ii) at least one immunomodulatory polypeptide; or
a5) the first polypeptide comprises, in order from N-terminus to C-terminus:
i) the HPV peptide epitope; and
ii) the first MHC polypeptide; and
b5) a second polypeptide comprises, in order from N-terminus to C-terminus:
i) at least one immunomodulatory polypeptide; and
ii) the second MHC polypeptide; or
a6) the first polypeptide comprises, in order from N-terminus to C-terminus:
i) the HPV peptide epitope;
ii) the first MHC polypeptide; and
iii) at least one immunomodulatory polypeptide; and
b6) the second polypeptide comprises:
i) the second MHC polypeptide.

5. A T-cell modulatory multimeric polypeptide of any one of claims 1-4, wherein:
a) the first MHC polypeptide is a β2-microglobulin polypeptide; and the second MHC polypeptide is an MHC class I heavy chain polypeptide; or
b) the first MHC polypeptide is an MHC class I heavy chain polypeptide; and the second MHC polypeptide is a β2-microglobulin polypeptide.

6. A T-cell modulatory multimeric polypeptide of claim 5, wherein:
a) the first polypeptide comprises, in order from N-terminus to C-terminus:
i) the HPV peptide epitope; and
ii) the β2-microglobulin polypeptide; and
b) the second polypeptide comprises, in order from N-terminus to C-terminus:
i) at least one immunomodulatory polypeptide;
ii) the MHC class I heavy chain polypeptide; and
iii) an Ig Fc polypeptide.

7. A T-cell modulatory multimeric polypeptide of claim 5, wherein:
a) the first polypeptide comprises, in order from N-terminus to C-terminus:
i) the HPV peptide epitope; and
ii) the β2-microglobulin polypeptide; and
b) the second polypeptide comprises, in order from N-terminus to C-terminus:
i) the MHC class I heavy chain polypeptide; and
ii) an Ig Fc polypeptide; and
iii) at least one immunomodulatory polypeptide

8. A T-cell modulatory multimeric polypeptide of any one of claims 1-7, wherein the at least one immunomodulatory polypeptide is selected from the group consisting of a cytokine, a 4-1BBL polypeptide, an ICOS-L polypeptide, an OX-40L polypeptide, a CD80 polypeptide, a CD86 polypeptide, a CD40 polypeptide, a CD70 polypeptide, and combinations thereof.

9. A T-cell modulatory multimeric polypeptide of any one of claims 1-8, wherein the at least one immunomodulatory polypeptide is an IL-2 polypeptide.

10. A T-cell modulatory multimeric polypeptide of any one of claims 1-9, wherein the multimeric polypeptide comprises at least two immunomodulatory polypeptides, and wherein at least two of the immunomodulatory polypeptides are the same, optionally wherein the 2 or more immunomodulatory polypeptides are in tandem.

11. A T-cell modulatory multimeric polypeptide of any one of claims 1-10, wherein the immunomodulatory polypeptide is a variant IL-2 polypeptide that exhibits reduced affinity to an IL-2 receptor compared to the affinity of a wild-type IL-2 polypeptide for the IL-2 receptor.

12. A T-cell modulatory multimeric polypeptide of claim 11, wherein the variant IL-2 polypeptide comprises: i) an H16A substitution and an F42A substitution; or ii) an H16T substitution and an F42A substitution.

13. A T-cell modulatory multimeric polypeptide of any one of claims 1-12, wherein the first polypeptide and the second polypeptide are covalently linked to one another, optionally wherein the covalent linkage is via a disulfide bond.

14. A T-cell modulatory multimeric polypeptide of any one of claims 1-13, wherein the first MHC polypeptide or a linker between the epitope and the first MHC polypeptide comprises an amino acid substitution to provide a first Cys residue, wherein the second MHC polypeptide comprises an amino acid substitution to provide a second Cys residue, and wherein the disulfide linkage is between the first and the second Cys residues.

15. The T-cell modulatory multimeric polypeptide of any one of claims 1-14, wherein the polypeptide comprises a disulfide bond between: i) a Cys present in a linker between the HPV peptide epitope and the first MHC class I polypeptide, wherein the first MHC class I polypeptide is a β2M polypeptide; and ii) a Cys residue introduced via a Y84C substitution in the second MHC class I polypeptide, wherein the second MHC class I polypeptide is a MHC Class I heavy chain polypeptide.

16. The T-cell modulatory multimeric polypeptide of any one of claims 1-14, wherein the polypeptide comprises a disulfide bond between i) a Cys residue introduced into the first MHC class I polypeptide via an R12C substitution, wherein the first MHC class I polypeptide is a β2M polypeptide; and ii) a Cys residue introduced into the second MHC class I polypeptide, via an A236C substitution, wherein second MHC class I polypeptide is an MIX Class 1 heavy chain polypeptide.

17. The T-cell modulatory multimeric polypeptide of any one of claims 1-14, wherein the polypeptide comprises a first disulfide bond between: i) a Cys present in a linker between the HPV peptide epitope and the first MHC class I polypeptide, wherein the first MHC class I polypeptide is a β2M polypeptide; and ii) a Cys residue introduced via a Y84C substitution in the second MHC class polypeptide, wherein the second MHC class I polypeptide is a MHC Class I heavy chain polypeptide, and a second disulfide bond between i) a Cys residue introduced into the β2M polypeptide via an R12C substitution; and ii) a Cys residue introduced into the MHC Class I heavy chain polypeptide via an A236C substitution.

18. A T-cell modulatory multimeric polypeptide of claim 15 or claim 17, wherein the Linker between the HPV peptide epitope and the first MHC is GCGGS(G4S)n (SEQ ID NO:315), where n is 1, 2, 3, 4, 5, 6, 7, 8, or 9.

19. A T-cell modulatory multimeric polypeptide of any one of claims 1-18, wherein the HPV peptide epitope has a length of from about 4 amino acids to about 25 amino acids.

20. A T-cell modulatory multimeric polypeptide of any one of claims 1-19, wherein the III/V peptide epitope comprises:
a) the HPV E6 amino acid sequence VYDFAFRDL (SEQ ID NO:486); or
b) an HPV E7 amino acid sequence selected from the group consisting of: RAHYNIVTF (SEQ ID NO:505); CDSTLRLCV (SEQ ID NO:481); and LCVQSTHVDI (SEQ ID NO:482).

21. A T-cell modulatory multimeric polypeptide of any one of claims 1-20, wherein the first or the second MHC polypeptide comprises:
a) an amino acid sequence having at least 95% amino acid sequence identity to the HLA-A*0101, HLA-A*020I, HLA-A*0201, HLA-A*1101, HLA-A*2301, HLA-A*2402, HLA-A*2407, HLA-A*3303, or HLA-A*3401 amino acid sequence depicted in FIG. 11A; or
h) an amino acid sequence having at least 95% amino acid sequence identity to the HLA-B*0702, HLA-B*0801, HLA-B*1502, HLA-B*3802, HLA-B*4001, HLA-B*4601, or HLA-B*5301 amino acid sequence depicted in FIG. 12A; or
c) an amino acid sequence having at least 95% amino acid sequence identity to the HLA-C*0102, HLA-C*0303, HLA-C*0304, HLA-C*0401, HLA-C*0602, HLA-C*0701, HLA-C*0702, HLA-C*0801, or HLA-C*1502 depicted in FIG. 13A.

22. A T-cell modulatory multimeric polypeptide of any one of claims 1-20, wherein the first MHC polypeptide is a β2M polypeptide, and wherein the second MHC polypeptide comprises an amino acid sequence having at least 95% amino acid sequence identity to an HLA-A*2402 polypeptide.

23. A T-cell modulatory multimeric polypeptide of any one of claims 1-20, wherein the first MHC polypeptide is a β2M polypeptide, and wherein the second MHC polypeptide comprises an amino acid sequence having at least 95% amino acid sequence identity to an HLA-A*0201 polypeptide.

24. A T-cell modulatory multimeric polypeptide of any one of claims 1-23, wherein the multimeric polypeptide comprises a first and a second heterodimer, and wherein the first and second heterodimers are covalently bound by one or more disulfide bonds between the Ig Fc polypeptides of the first and second heterodimers.

25. A nucleic acid comprising a nucleotide sequence encoding a first or second polypeptide according to any one of claims 1-24.

26. An expression vector comprising the nucleic acid of claim 25.

27. A method of selectively modulating the activity of T cell specific for human papillomavirus (HPV) epitope, the method comprising contacting the T cell with a T-cell modulatory multimeric polypeptide according to any one of claims 1-24, wherein said contacting selectively modulates the activity of the HPV epitope-specific T cell.

28. A method of treating a patient having a cancer, the method comprising administering to the patient an effective amount of a pharmaceutical composition comprising T-cell modulatory multimeric polypeptide according to any one of claims 1-24.

29. The method of claim 28, wherein the cancer is cervical cancer, prostate cancer, or ovarian cancer.

30. A method of claim 28 or claim 29, further comprising administering one or more checkpoint inhibitors to the individual.

31. A method according to claim 30, wherein the checkpoint inhibitor is an antibody that binds to a polypeptide selected from the group consisting of CD27, CD28, CD40, CD122, CD96, CD73, CD47, OX40, GITR, CSF1R, JAK, PI3K delta, PI3K gamma, TAM, arginase, CD137, ICOS, A2AR, B7-H3, B7-H4, BTLA, CTLA-4, LAG3, TIM3, VISTA, CD96, TIGIT, CD122, PD-1, PD-L1, and PD-L2.

32. A method according to claim 31, wherein the checkpoint inhibitor is an antibody specific for PD-1, PD-L1, or CTLA4.

33. A method according to claim 30, wherein the one or more checkpoint inhibitors is selected from the group consisting of nivolumab, pembrolizumab, pidilizumab, AMP-224, MPDL3280A, MUX-1105, MEDI-4736, arclumab, ipilimumab, tremelimumab, pidilizumab, IMP321, MGA271, BMS-986016, lirilumab, urelumab, PF-05082566, IPH2101, MEDI-6469, CP-870,893, Mogamulizumab, Varlilumab, Avelumab, Galiximab, AMP-514, AUNP 12, Indoximod, NLG-919, INCB024360, KN035, and combinations thereof.

34. A method of modulating an immune response in an individual, the method comprising administering to the individual an effective amount of the T-cell modulatory multimeric polypeptide of any one of claims 1-24,
wherein said administering induces an epitope-specific T cell response and an epitope-non-specific T cell response, and
wherein the ratio of the epitope-specific T cell response to the epitope-non-specific T cell response is at least 2:1.

35. A method of delivering an immunomodulatory polypeptide selectively to a target T cell, the method comprising contacting a mixed population of T cells with a T-cell modulatory multimeric polypeptide of any one of claims 1-24, wherein the mixed population of T cells comprises the target T cell and non-target T cells, wherein the target T cell is specific for the HPV epitope present within the T-cell modulatory multimeric polypeptide, and wherein said contacting delivers the one or more immunomodulatory polypeptides present within the T-cell modulatory multimeric polypeptide to the target T cell.

36. A method of detecting, in a mixed population of T cells obtained from an individual, the presence of a target T cell that binds an HPV epitope, the method comprising:
a) contacting in vitro the mixed population of T cells with the T-cell modulatory multimeric polypeptide of any one of claims 1-24, wherein the T-cell modulatory multimeric polypeptide comprises the HPV epitope; and
b) detecting activation and/or proliferation of T cells in response to said contacting, wherein activated and/or proliferated T cells indicates the presence of the target T cell.

The application's sequence listing, which the Patent Office published only in electronic form, follows.

SEQUENCE LISTING (511 sequences)

SEQ ID NO: 1 - protein, 245 aa, Homo sapiens
MRIFAVFIFMTYWHLLNAFTVTVPKDLYVVEYGSNMTIECKFPVEKQLDLAALIVYWEMEDKNIIQFVHGEEDLKVQHSSYRQRARLLKDQLSLGNAALQITDVKLQDAGVYRCMISYGGADYKRITVKVNAPYNKINQRILVVDPVTSEHELTCQAEGYPKAEVIWTSSDHQVLSGKTTTTNSKREEKLFNVTSTLRINTTTNEIFYCTFRRLDPEENHTAELVIPGNILNVSIKICLTLSPST

SEQ ID NO: 2 - protein, 219 aa, Homo sapiens
FTVTVPKDLYVVEYGSNMTIECKFPVEKQLDLAALIVYWEMEDKNIIQFVHGEEDLKVQHSSYRQRARLLKDQLSLGNAALQITDVKLQDAGVYRCMISYGGADYKRITVKVNAPYNKINQRILVVDPVTSEHELTCQAEGYPKAEVIWTSSDHQVLSGKTTTTNSKREEKLFNVTSTLRINTTTNEIFYCTFRRLDPEENHTAELVIPGNILNVSIKI

SEQ ID NO: 3 - protein, 268 aa, Homo sapiens
PGWFLDSPDRPWNPPTFSPALLVVTEGDNATFTCSFSNTSESFVLNWYRMSPSNQTDKLAAFPEDRSQPGQDCRFRVTQLPNGRDFHMSVVRARRNDSGTYLCGAISLAPKAQIKESLRAELRVTERRAEVPTAHPSPSPRPAGQFQTLVVGVVGGLLGSLVLLVWVLAVICSRAARGTIGARRTGQPLKEDPSAVPVFSVDYGELDFQWREKTPEPPVPCVPEQTEYATIVFPSGMGTSSPARRGSADGPRSAQPLRPEDGHCSWPL

SEQ ID NO: 4 - protein, 208 aa, Homo sapiens [sequence omitted]

SEQ ID NO: 5 - protein, 220 aa, Homo sapiens
MLRLLLALNLFPSIQVTGNKILVKQSPMLVAYDNAVNLSCKYSYNLFSREFRASLHKGLDSAVEVCVVYGNYSQQLQVYSKTGFNCDGKLGNESVTFYLQNLYVNQTDIYFCKIEVMYPPPYLDNEKSNGTIIHVKGKHLCPSPLFPGPSKPFWVLVVVGGVLACYSLLVTVAFIIFWVRSKRSRLLHSDYMNMTPRRPGPTRKHYQPYAPPRDFAAYRS

SEQ ID NO: 6 - protein, 123 aa, Homo sapiens
MLRLLLALNLFPSIQVTGNKILVKQSPMLVAYDNAVNLSWKHLCPSPLFPGPSKPFWVLVVVGGVLACYSLLVTVAFIIFWVRSKRSRLLHSDYMNMTPRRPGPTRKHYQPYAPPRDFAAYRS

SEQ ID NO: 7 - protein, 101 aa, Homo sapiens
MLRLLLALNLFPSIQVTGKHLCPSPLFPGPSKPFWVLVVVGGVLACYSLLVTVAFIIFWVRSKRSRLLHSDYMNMTPRRPGPTRKHYQPYAPPRDFAAYRS

SEQ ID NO: 8 - protein, 224 aa, Homo sapiens
APLKIQAYFNETADLPCQFANSQNQSLSELVVFWQDQENLVLNEVYLGKEKFDSVHSKYMNRTSFDSDSWTLRLHNLQIKDKGLYQCIIHHKKPTGMIRIHQMNSELSVLANFSQPEIVPISNITENVYINLTCSSIHGYPEPKKMSVLLRTKNSTIEYDGIMQKSQDNVTELYDVSISLSVSFPDVTSNMTIFCILETDKTRLLSSPFSIELEDPQPPPDHIP

SEQ ID NO: 9 - protein, 110 aa, Homo sapiens
APLKIQAYFNETADLPCQFANSQNQSLSELVVFWQDQENLVLNEVYLGKEKFDSVHSKYMNRTSFDSDSWTLRLHNLQIKDKGLYQCIIHHKKPTGMIRIHQMNSELSVL

SEQ ID NO: 10 - protein, 254 aa, Homo sapiens
MEYASDASLDPEAPWPPAPRARACRVLPWALVAGLLLLLLLAAACAVFLACPWAVSGARASPGSAASPRLREGPELSPDDPAGLLDLRQGMFAQLVAQNVLLIDGPLSWYSDPGLAGVSLTGGLSYKEDTKELVVAKAGVYYVFFQLELRRVVAGEGSGSVSLALHLQPLRSAAGAAALALTVDLPPASSEARNSAFGFQGRLLHLSAGQRLGVHLHTEARARHAWQLTQGATVLGLFRVTPEIPAGLPSPRSE

SEQ ID NO: 11 - protein, 174 aa, Homo sapiens
PAGLLDLRQGMFAQLVAQNVLLIDGPLSWYSDPGLAGVSLTGGLSYKEDTKELVVAKAGVYYVFFQLELRRVVAGEGSGSVSLALHLQPLRSAAGAAALALTVDLPPASSEARNSAFGFQGRLLHLSAGQRLGVHLHTEARARHAWQLTQGATVLGLFRVTPEIPAGLPSPRSE

SEQ ID NO: 12 - protein, 175 aa, Homo sapiens
DPAGLLDLRQGMFAQLVAQNVLLIDGPLSWYSDPGLAGVSLTGGLSYKEDTKELVVAKAGVYYVFFQLELRRVVAGEGSGSVSLALHLQPLRSAAGAAALALTVDLPPASSEARNSAFGFQGRLLHLSAGQRLGVHLHTEARARHAWQLTQGATVLGLFRVTPEIPAGLPSPRSE

SEQ ID NO: 13 - protein, 167 aa, Homo sapiens
DPAGLLDLRQGMFAQLVAQNVLLIDGPLSWYSDPGLAGVSLTGGLSYKEDTKELVVAKAGVYYVFFQLELRRVVAGEGSGSVSLALHLQPLRSAAGAAALALTVDLPPASSEARNSAFGFQGRLLHLSAGQRLGVHLHTEARARHAWQLTQGATVLGLFRVTPEIPA

SEQ ID NO: 14 - protein, 255 aa, Homo sapiens
MGNSCYNIVATLLLVLNFERTRSLQDPCSNCPAGTFCDNNRNQICSPCPPNSFSSAGGQRTCDICRQCKGVFRTRKECSSTSNAECDCTPGFHCLGAGCSMCEQDCKQGQELTKKGCKDCCFGTFNDQKRGICRPWTNCSLDGKSVLVNGTKERDVVCGPSPADLSPGASSVTPPAPAREPGHSPQIISFFLALTSTALLFLLFFLTLRFSVVKRGRKKLLYIFKQPFMRPVQTTQEEDGCSCRFPEEEEGGCEL

SEQ ID NO: 15 - protein, 133 aa, Homo sapiens [sequence omitted]

SEQ ID NO: 16 - protein, 251 aa, Homo sapiens
ELCDDDPPEIPHATFKAMAYKEGTMLNCECKRGFRRIKSGSLYMLCTGNSSHSSWDNQCQCTSSATRNTTKQVTPQPEEQKERKTTEMQSPMQPVDQASLPGHCREPPPWENEATERIYHFVVGQMVYYQCVQGYRALHRGPAESVCKMTHGKTRWTQPQLICTGEMETSQFPGEEKPQASPEGRPESETSCLVTTTDFQIQTEMAATMETSIFTTEYQVAVAGCVFLLISVLLLSGLTWQRRQRKSRRTI

SEQ ID NO: 17 - protein, 524 aa, Homo sapiens
VNGTSQFTCFYNSRANISCVWSQDGALQDTSCQVHAWPDRRRWNQTCELLPVSQASWACNLILGAPDSQKLTTVDIVTLRVLCREGVRWRVMAIQDFKPFENLRLMAPISLQVVHVETHRCNISWEISQASHYFERHLEFEARTLSPGHTWEEAPLLTLKQKQEWICLETLTPDTQYEFQVRVKPLQGEFTTWSPWSQPLAFRTKPAALGKDTIPWLGHLLVGLSGAFGFIILVYLLINCRNTGPWLKKVLKCNTPDPSKFFSQLSSEHGGDVQKWLSSPFPSSSFSPGGLAPEISPLEVLERDKVTQLLLQQDKVPEPASLSSNHSLTSCFTNQGYFFFHLPDALEIEACQVYFTYDPYSEEDPDEGVAGAPTGSSPQPLQPLSGEDDAYCTFPSRDDLLLFSPSLLGGPSPPSTAPGGSGAGEERMPPSLQERVPRDWDPQPLGPPTPGVPDLVDFQPPPELVLREAGEEVPDAGPREGVSFPWSRPPGQGEFRALNARLPLNTDAYLSLQELQGQDPTHLV

SEQ ID NO: 18 - protein, 347 aa, Homo sapiens
LNTTILTPNGNEDTTADFFLTTMPTDSLSVSTLPLPEVQCFVFNVEYMNCTWNSSSEPQPTNLTLHYWYKNSDNDKVQKCSHYLFSEEITSGCQLQKKEIHLYQTFVVQLQDPREPRRQATQMLKLQNLVIPWAPENLTLHKLSESQLELNWNNRFLNHCLEHLVQYRTDWDHSWTEQSVDYRHKFSLPSVDGQKRYTFRVRSRFNPLCGSAQHWSEWSHPIHWGSNTSKENPFLFALEAVVISVGSMGLIISLLCVYFWLERTMPRIPTLKNLEDLVTEYHGNFSAWSGVSKGLAESLQPDYSERLCLVSEIPPKGGALGEGPGASPCNQHSPYWAPPCYTLKPET

SEQ ID NO: 19 - protein, 119 aa, Homo sapiens
MSRSVALAVLALLSLSGLEAIQRTPKIQVYSRHPAENGKSNFLNCYVSGFHPSDIEVDLLKNGERIEKVEHSDLSFSKDWSFYLLYYTEFTPTEKDEYACRVNHVTLSQPKIVKWDRDM

SEQ ID NO: 20 - protein, 119 aa, Macaca mulatta
MSRSVALAVLALLSLSGLEAIQRTPKIQVYSRHPPENGKPNFLNCYVSGFHPSDIEVDLLKNGEKMGKVEHSDLSFSKDWSFYLLYYTEFTPNEKDEYACRVNHVTLSGPRTVKWDRDM

SEQ ID NO: 21 - protein, 118 aa, Bos Taurus
MARFVALVLLGLLSLSGLDAIQRPPKIQVYSRHPPEDGKPNYLNCYVYGFHPPQIEIDLLKNGEKIKSEQSDLSFSKDWSFYLLSHAEFTPNSKDQYSCRVKHVTLEQPRIVKWDRDL

SEQ ID NO: 22 - protein, 119 aa, Mus musculus
MARSVTLVFLVLVSLTGLYAIQKTPQIQVYSRHPPENGKPNILNCYVTQFHPPHIEIQMLKNGKKIPKVEMSDMSFSKDWSFYILAHTEFTPTETDTYACRVKHASMAEPKTVYWDRDM

SEQ ID NO: 23 - protein, 365 aa, Homo sapiens
MAVMAPRTLLLLLSGALALTQTWAGSHSMRYFFTSVSRPGRGEPRFIAVGYVDDTQFVRFDSDAASQKMEPRAPWIEQEGPEYWDQETRNMKAHSQTDRANLGTLRGYYNQSEDGSHTIQIMYGCDVGPDGRFLRGYRQDAYDGKDYIALNEDLRSWTAADMAAQITKRKWEAVHAAEQRRVYLEGRCVDGLRRYLENGKETLQRTDPPKTHMTHHPISDHEATLRCWALGFYPAEITLTWQRDGEDQTQDTELVETRPAGDGTFQKWAAVVVPSGEEQRYTCHVQHEGLPKPLTLRWELSSQPTIPIVGIIAGLVLLGAVITGAVVAAVMWRRKSSDRKGGSYTQAASSDSAQGSDVSLTACKV

SEQ ID NO: 24 - protein, 365 aa, Homo sapiens
MAVMAPRTLLLLLSGALALTQTWAGSHSMRYFYTSVSRPGRGEPRFIAVGYVDDTQFVRFDSDAASQRMEPRAPWIEQEGPEYWDQETRNVKAQSQTDRVDLGTLRGYYNQSEDGSHTIQIMYGCDVGPDGRFLRGYRQDAYDGKDYIALNEDLRSWTAADMAAQITKRKWEAAHAAEQQRAYLEGRCVEWLRRYLENGKETLQRTDPPKTHMTHHPISDHEATLRCWALGFYPAEITLTWQRDGEDQTQDTELVETRPAGDGTFQKWAAVVVPSGEEQRYTCHVQHEGLPKPLTLRWELSSQPTIPIVGIIAGLVLLGAVITGAVVAAVMWRRKSSDRKGGSYTQAASSDSAQGSDVSLTACKV

SEQ ID NO: 25 - protein, 365 aa, Homo sapiens [sequence omitted]

SEQ ID NO: 26 - protein, 365 aa, Homo sapiens [sequence omitted]

SEQ ID NO: 27 - protein, 362 aa, Homo sapiens
MLVMAPRTVLLLLSAALALTETWAGSHSMRYFYTSVSRPGRGEPRFISVGYVDDTQFVRFDSDAASPREEPRAPWIEQEGPEYWDRNTQIYKAQAQTDRESLRNLRGYYNQSEAGSHTLQSMYGCDVGPDGRLLRGHDQYAYDGKDYIALNEDLRSWTAADTAAQITQRKWEAAREAEQRRAYLEGECVEWLRRYLENGKDKLERADPPKTHVTHHPISDHEATLRCWALGFYPAEITLTWQRDGEDQTQDTELVETRPAGDRTFQKWAAVVVPSGEEQRYTCHVQHEGLPKPLTLRWEPSSQSTVPIVGIVAGLAVLAVVVIGAVVAAVMCRRKSSGGKGGSYSQAACSDSAQGSDVSLTA

SEQ ID NO: 28 - protein, 366 aa, Homo sapiens
MRVMAPRALLLLLSGGLALTETWACSHSMRYFDTAVSRPGRGEPRFISVGYVDDTQFVRFDSDAASPRGEPRAPWVEQEGPEYWDRETQNYKRQAQADRVSLRNLRGYYNQSEDGSHTLQRMYGCDLGPDGRLLRGYDQSAYDGKDYIALNEDLRSWTAADTAAQITQRKLEAARAAEQLRAYLEGTCVEWLRRYLENGKETLQRAEPPKTHVTHHPLSDHEATLRCWALGFYPAEITLTWQRDGEDQTQDTELVETRPAGDGTFQKWAAVVVPSGQEQRYTCHMQHEGLQEPLTLSWEPSSQPTIPIMGIVAGLAVLVVLAVLGAVVTAMMCRRKSSGGKGGSCSQAACSNSAQGSDESLITCKA

SEQ ID NO: 29 - protein, 276 aa, Artificial sequence
  synthetic sequence
  Misc_feature (9)..(9): X is phenylalanine, tyrosine, serine, or threonine
  Misc_feature (44)..(44): X is lysine or arginine
  Misc_feature (62)..(62): X is glutamine, glycine, glutamic acid, or arginine
  Misc_feature (63)..(63): X is asparagine or glutamic acid
  Misc_feature (65)..(65): X is arginine or glycine
  Misc_feature (66)..(66): X is asparagine or lysine
  Misc_feature (67)..(67): X is methionine or valine
  Misc_feature (70)..(70): X is histidine or glutamine
  Misc_feature (73)..(73): X is threonine or isoleucine
  Misc_feature (74)..(74): X is aspartic acid or histidine
  Misc_feature (76)..(76): X is alanine, valine, or glutamic acid
  Misc_feature (77)..(77): X is asparagine or aspartic acid
  Misc_feature (79)..(79): X is glycine or arginine
  Misc_feature (80)..(80): X is threonine or arginine
  Misc_feature (81)..(81): X is leucine or alanine
  Misc_feature (82)..(82): X is arginine or leucine
  Misc_feature (83)..(83): X is glycine ir arginine
  Misc_feature (90)..(90): X is alanine or aspartic acid
  Misc_feature (95)..(95): X is isoleucine, leucine, or valine
  Misc_feature (97)..(97): X is isoleucine, arginine, or methionine
  Misc_feature (99)..(99): X is phenylalanine or tyrosine
  Misc_feature (105)..(105): X is serine or proline
  Misc_feature (107)..(107): X is tryptophan or glycine
  Misc_feature (114)..(114): X is arginine, histidine, or glutamine
  Misc_feature (116)..(116): X is aspartic acid or tyrosine
  Misc_feature (127)..(127): X is asparagine or lysine
  Misc_feature (142)..(142): X is threonine or isoleucine
  Misc_feature (144)..(144): X is lysine or glutamine
  Misc_feature (145)..(145): X is arginine or histidine
  Misc_feature (149)..(149): X is alanine or threonine
  Misc_feature (150)..(150): X is alanine or valine
  Misc_feature (151)..(151): X is histidine or arginine
  Misc_feature (156)..(156): X is arginine, leucine, glutamine, or tryptophan
  Misc_feature (158)..(158): X is valine or alanine
  Misc_feature (161)..(161): X is aspartic acid or glutamic acid
  Misc_feature (163)..(163): X is arginine or threonine
  Misc_feature (166)..(166): X is aspartic acid or glutamic acid
  Misc_feature (167)..(167): X is tryptophan or glycine
  Misc_feature (184)..(184): X is proline or alanine
  Misc_feature (193)..(193): X is proline or alanine
  Misc_feature (194)..(194): X is valine or isoleucine
  Misc_feature (207)..(207): X is serine or glycine
  Misc_feature (246)..(246): X is alanine or serine
  Misc_feature (253)..(253): X is glutamine or glutamic acid
  Misc_feature (276)..(276): X is proline or leucine
GSHSMRYFXTSVSRPGRGEPRFIAVGYVDDTQFVRFDSDAASQXMEPRAPWIEQEGPEYWDXXTXXXKAXSQXXRXXLXXXXXYYNQSEXGSHTXQXMXGCDVGXDXRFLRGYXQXAYDGKDYIALXEDLRSWTAADMAAQXTXXKWEXXXEAEQXRXYLXGXCVXXLRRYLENGKETLQRTDXPKTHMTHHXXSDHEATLRCWALXFYPAEITLTWQRDGEDQTQDTELVETRPAGDGTFQKWAXVVVPSGXEQRYTCHVQHEGLPKPLTLRWEX

SEQ ID NO: 30 - protein, 276 aa, Artificial sequence
  synthetic sequence
  Misc_feature (9)..(9): X is histidinem tyrosine, or aspartic acid
  Misc_feature (11)..(11): X is alanien or serine
  Misc_feature (12)..(12): X is methionine or valine
  Misc_feature (24)..(24): X is alanine, serine, or threonine
  Misc_feature (32)..(32): X is glutamie or leucine
  Misc_feature (41)..(41): X is alanine or threonine
  Misc_feature (45)..(45): X is glutamic acid, methionine, lysine, or threonine
  Misc_feature (46)..(46): X is alanine or threonine
  Misc_feature (63)..(63): X is glutamic acid or asparagine
  Misc_feature (66)..(66): X is isoleucine or lysine
  Misc_feature (67)..(67): X is tyrosine, phenylalanie, serine, or cystine
  Misc_feature (70)..(70): X is asparagine or glutamine
  Misc_feature (71)..(71): X is alanine or threonine
  Misc_feature (74)..(74): X is aspartic acid or tyrosine
  Misc_feature (76)..(76): X is glutamic acid or valine
  Misc_feature (77)..(77): X is serine or asparagine
  Misc_feature (80)..(80): X is threonine, asparagine, or isoleucine
  Misc_feature (81)..(81): X is alanine or leucine
  Misc_feature (82)..(82): X is leucine or arginine
  Misc_feature (83)..(83): X is arginine or glycine
  Misc_feature (94)..(94): X is threonine or isoleucine
  Misc_feature (95)..(95): X is leucine or isoleucine
  Misc_feature (97)..(97): X is arginine or serine
  Misc_feature (131)..(131): X is arginine or serine
  Misc_feature (143)..(143): X is S or T
  Misc_feature (147)..(147): X is L or W
  misc_feature (152)..(152): Xaa is E OR V
  misc_feature (156)..(156): Xaa is R, D, L
  misc_feature (158)..(158): Xaa A or T
  Misc_feature (163)..(163): X is leucine, glutamic acid, or threonine
  Misc_feature (177)..(177): X is glutamic acid or aspartic acid
  Misc_feature (178)..(178): X is lysine or threonine
  Misc_feature (180)..(180): X is glutamic acid or glutamine
  Misc_feature (194)..(194): X is isoleucine or valine
GSHSMRYFXTXXSRPGRGEPRFIXVGYVDDTXFVRFDSDAXSPRXXPRAPWIEQEGPEYWDRXTQXXKTXXTQXYXXNLXXXXYYNQSEAGSHXXQXMYGCDLGPDGRLLRGHDQSAYDGKDYIALNEDLXSWTAADTAAQIXQRKXEAARXAEQXRXYLEGXCVEWLRRYLENGKXXLXRADPPKTHVTHHPXSDHEATLRCWALGFYPAEITLTWQRDGEDQTQDTELVETRPAGDRTFQKWAAVVVPSGEEQRYTCHVQHEGLPKPLTLRWEP

SEQ ID NO: 31 - protein, 276 aa, Artificial sequence
  synthetic sequence
  Misc_feature (1)..(1): X is cysteine or glycine
  Misc_feature (6)..(6): X is arginine or lysine
  Misc_feature (9)..(9): X is phenylalanine, tyrosine, serine, or aspartic acid
  Misc_feature (14)..(14): X is arginine or tryptophan
  Misc_feature (21)..(21): X is histidine or arginine
  Misc_feature (24)..(24): X is alanine or serine
  Misc_feature (35)..(35): X is glutamine or arginine
  Misc_feature (49)..(49): X is alanine or arginine
  Misc_feature (66)..(66): X is asparagine, or lysine
  Misc_feature (73)..(73): X is threonine or alanine
  Misc_feature (77)..(77): X is serine or asparagine
  Misc_feature (80)..(80): X is asparagine or lysine
  Misc_feature (90)..(90): X is alanine or aspartic acid
  Misc_feature (91)..(91): X is glycine or arginine
  Misc_feature (94)..(94): X is threonine or isoleucine
  Misc_feature (95)..(95): X is leucine or isoleucine
  Misc_feature (97)..(97): X is tryptophan or arginine
  Misc_feature (99)..(99): X is cysteine, tyrosine, phenylalanine, or serine
  Misc_feature (103)..(103): X is leucine or valine
  Misc_feature (113)..(113): X is tyrosine or histidine
  Misc_feature (114)..(114): X is aspartic acid or asparagine
  Misc_feature (116)..(116): X is tyrosine, phenylalanine, serine, or leucine
  Misc_feature (147)..(147): X is leucine or tryptophan
  Misc_feature (152)..(152): X is glutamic acid, alanine, or threonine
  Misc_feature (156)..(156): X is arginine, leucine, or tryptophan
  Misc_feature (163)..(163): X is leucine or threonine
  Misc_feature (173)..(173): X is glutamic acid or lysine
  Misc_feature (177)..(177): X is glutamic acid or lysine
  Misc_feature (184)..(184): X is histidine or proline
  Misc_feature (194)..(194): X is arginine or valine
  Misc_feature (219)..(219): X is tryptophan or arginine
  Misc_feature (248)..(248): X is valine or methionine
  Misc_feature (253)..(253): X is glutamic acid or lysine
  Misc_feature (261)..(261): X is methionine or valine
  Misc_feature (267)..(267): X is proline or glutamine
  Misc_feature (273)..(273): X is arginine or serine
  Misc_feature (275)..(275): X is proline or glycine
XSHSMXYFXTAVSXPGRGEPXFIXVGYVDDTQFVXFDSDAASPRGEPRXPWVEQEGPEYWDRETQXYKRQAQXDRVXLRXLRGYYNQSEXXSHXXQXMXGCDXGPDGRLLRGXXQXAYDGKDYIALNEDLRSWTAADTAAQITQRKXEAARXAEQXRAYLEGXCVEWLRRYLXNGKXTLQRAEXPKTHVTHHPXSDHEATLRCWALGFYPAEITLTWQXDGEDQTQDTELVETRPAGDGTFQKWAAVXVPSGXEQRYTCHXQHEGLXEPLTLXWXP

SEQ ID NO: 32 - protein, 284 aa, Artificial sequence
  synthetic sequence
  misc_feature (89)..(89): Xaa is K or E
  misc_feature (107)..(107): Xaa is R or G
  misc_feature (157)..(157): Xaa is R or G
  misc_feature (158)..(158): Xaa is A or V
  misc_feature (255)..(255): Xaa is Q or P
  misc_feature (267)..(267): Xaa is P or S
GSHSLKYFHTSVSRPGRGEPRFISVGYVDDTQFVRFDNDAASPRMVPRAPWMEQEGSEYWDRETRSARDTAQIFRVNLRTLRGYYNQSXAGSHTLQWMHGCELGPDXRFLRGYEQFAYDGKDYLTLNEDLRSWTAVDTAAQISEQKSNDASEAEHQXXYLEDTCVEWLHKYLEKGKETLLHLEPPKTHVTHHPISDHEATLRCWALGFYPAEITLTWQQDGEGHTQDTELVETRPAGDGTFQKWAAVVVPSGEEXRYTCHVQHEGLXEPVTLRWKPASQPTIPI

SEQ ID NO: 33 - protein, 284 aa, Artificial sequence
  synthetic sequence
  misc_feature (7)..(7): Xaa is Y or F
  misc_feature (50)..(50): Xaa is P or Q
  misc_feature (251)..(251): Xaa is S or P
  misc_feature (278)..(278): Xaa is P or L
GSHSLRXFSTAVSRPGRGEPRYIAVEYVDDTQFLRFDSDAAIPRMEPREXWVEQEGPQYWEWTTGYAKANAQTDRVALRNLLRRYNQSEAGSHTLQGMNGCDMGPDGRLLRGYHQHAYDGKDYISLNEDLRSWTAADTVAQITQRFYEAEEYAEEFRTYLEGECLELLRRYLENGKETLQRADPPKAHVAHHPISDHEATLRCWALGFYPAEITLTWQRDGEEQTQDTELVETRPAGDGTFQKWAAVVVPXGEEQRYTCHVQHEGLPQPLILRWEQSXQPTIPI

SEQ ID NO: 34 - protein, 284 aa, Artificial sequence
  synthetic sequence
  misc_feature (13)..(13): Xaa is S or F
  misc_feature (27)..(27): Xaa is Y or H
  misc_feature (31)..(31): Xaa is T, S, or M
  misc_feature (34)..(34): Xaa is L or V
  misc_feature (54)..(54): Xaa is Q or R
  misc_feature (81)..(81): Xaa is P or L
  misc_feature (100)..(100): Xaa is G or D
  misc_feature (104)..(104): Xaa is G or V
  misc_feature (105)..(105): Xaa is S or C
  misc_feature (110)..(110): Xaa is L or I
  misc_feature (159)..(159): Xaa is Y or H
  misc_feature (169)..(169): Xaa is H or R
  misc_feature (171)..(171): Xaa is Y or H
  misc_feature (178)..(178): Xaa is M or T
  misc_feature (185)..(185): Xaa is P or A
  misc_feature (219)..(219): Xaa is R, W, or Q
  misc_feature (258)..(258): Xaa is T or M
  misc_feature (275)..(275): Xaa is K or E
GSHSMRYFSAAVXRPGRGEPRFIAMGXVDDXQFXRFDSDSACPRMEPRAPWVEXEGPEYWEEETRNTKAHAQTDRMNLQTXRGYYNQSEASSHTLQWMIXCDLXXDGRLXRGYEQYAYDGKDYLALNEDLRSWTAADTAAQISKRKCEAANVAEQRRAXLEGTCVEWLXRXLENGKEXLQRADPXKTHVTHHPVFDYEATLRCWALGFYPAEIILTWQXDGEDQTQDVELVETRPAGDGTFQKWAAVVVPSGEEQRYXCHVQHEGLPEPLMLRWXQSSLPTIPI

SEQ ID NO: 35 - protein, 276 aa, Artificial sequence; identical to SEQ ID NO: 29
  synthetic sequence
  Misc_feature (9)..(9): X is phenylalanine, tyrosine, serine, or threonine
  Misc_feature (44)..(44): X is lysine or arginine
  Misc_feature (62)..(62): X is glutamine, glycine, glutamic acid, or arginine
  Misc_feature (63)..(63): X is asparagine or glutamic acid
  Misc_feature (65)..(65): X is arginine or glycine
  Misc_feature (66)..(66): X is asparagine or lysine
  Misc_feature (67)..(67): X is methionine or valine
  Misc_feature (70)..(70): X is histidine or glutamine
  Misc_feature (73)..(73): X is threonine or isoleucine
  Misc_feature (74)..(74): X is aspartic acid or histidine
  Misc_feature (76)..(76): X is alanine, valine, or glutamic acid
  Misc_feature (77)..(77): X is asparagine or aspartic acid
  Misc_feature (79)..(79): X is glycine or arginine
  Misc_feature (80)..(80): X is threonine or arginine
  Misc_feature (81)..(81): X is leucine or alanine
  Misc_feature (82)..(82): X is arginine or leucine
  Misc_feature (83)..(83): X is glycine ir arginine
  Misc_feature (90)..(90): X is alanine or aspartic acid
  Misc_feature (95)..(95): X is isoleucine, leucine, or valine
  Misc_feature (97)..(97): X is isoleucine, arginine, or methionine
  Misc_feature (99)..(99): X is phenylalanine or tyrosine
  Misc_feature (105)..(105): X is serine or proline
  Misc_feature (107)..(107): X is tryptophan or glycine
  Misc_feature (114)..(114): X is arginine, histidine, or glutamine
  Misc_feature (116)..(116): X is aspartic acid or tyrosine
  Misc_feature (127)..(127): X is asparagine or lysine
  Misc_feature (142)..(142): X is threonine or isoleucine
  Misc_feature (144)..(144): X is lysine or glutamine
  Misc_feature (145)..(145): X is arginine or histidine
  Misc_feature (149)..(149): X is alanine or threonine
  Misc_feature (150)..(150): X is alanine or valine
  Misc_feature (151)..(151): X is histidine or arginine
  Misc_feature (156)..(156): X is arginine, leucine, glutamine, or tryptophan
  Misc_feature (158)..(158): X is valine or alanine
  Misc_feature (161)..(161): X is aspartic acid or glutamic acid
  Misc_feature (163)..(163): X is arginine or threonine
  Misc_feature (166)..(166): X is aspartic acid or glutamic acid
  Misc_feature (167)..(167): X is tryptophan or glycine
  Misc_feature (184)..(184): X is proline or alanine
  Misc_feature (193)..(193): X is proline or alanine
  Misc_feature (194)..(194): X is valine or isoleucine
  Misc_feature (207)..(207): X is serine or glycine
  Misc_feature (246)..(246): X is alanine or serine
  Misc_feature (253)..(253): X is glutamine or glutamic acid
  Misc_feature (276)..(276): X is proline or leucine

SEQ ID NO: 36 - protein, 276 aa, Artificial sequence; identical to SEQ ID NO: 30
  synthetic sequence
  Misc_feature (9)..(9): X is histidinem tyrosine, or aspartic acid
  Misc_feature (11)..(11): X is alanine or serine
  Misc_feature (12)..(12): X is methionine or valine
  Misc_feature (24)..(24): X is alanine, serine, or threonine
  Misc_feature (32)..(32): X is glutamie or leucine
  Misc_feature (41)..(41): X is alanine or threonine
  Misc_feature (45)..(45): X is glutamic acid, methionine, lysine, or threonine
  Misc_feature (46)..(46): X is alanine or threonine
  Misc_feature (63)..(63): X is glutamic acid or asparagine
  Misc_feature (66)..(66): X is isoleucine or lysine
  Misc_feature (67)..(67): X is tyrosine, phenylalanie, serine, or cystine
  Misc_feature (70)..(70): X is asparagine or glutamine
  Misc_feature (71)..(71): X is alanine or threonine
  Misc_feature (74)..(74): X is aspartic acid or tyrosine
  Misc_feature (76)..(76): X is glutamic acid or valine
  Misc_feature (77)..(77): X is serine or asparagine
  Misc_feature (80)..(80): X is threonine, asparagine, or isoleucine
  Misc_feature (81)..(81): X is alanine or leucine
  Misc_feature (82)..(82): X is leucine or arginine
  Misc_feature (83)..(83): X is arginine or glycine
  Misc_feature (94)..(94): X is threonine or isoleucine
  Misc_feature (95)..(95): X is leucine or isoleucine
  Misc_feature (97)..(97): X is arginine or serine
  Misc_feature (131)..(131): X is arginine or serine
  Misc_feature (143)..(143): X is S or T
  Misc_feature (147)..(147): X is L or W
  misc_feature (152)..(152): Xaa is E OR V
  misc_feature (156)..(156): Xaa is R, D, L
  misc_feature (158)..(158): Xaa A or T
  Misc_feature (163)..(163): X is leucine, glutamic acid, or threonine
  Misc_feature (177)..(177): X is glutamic acid or aspartic acid
  Misc_feature (178)..(178): X is lysine or threonine
  Misc_feature (180)..(180): X is glutamic acid or glutamine
  Misc_feature (194)..(194): X is isoleucine or valine

SEQ ID NO: 37 - protein, 276 aa, Artificial sequence; identical to SEQ ID NO: 31
  synthetic sequence
  Misc_feature (1)..(1): X is cysteine or glycine
  Misc_feature (6)..(6): X is arginine or lysine
  Misc_feature (9)..(9): X is phenylalanine, tyrosine, serine, or aspartic acid
  Misc_feature (14)..(14): X is arginine or tryptophan
  Misc_feature (21)..(21): X is histidine or arginine
  Misc_feature (24)..(24): X is alanine or serine
  Misc_feature (35)..(35): X is glutamine or arginine
  Misc_feature (49)..(49): X is alanine or arginine
  Misc_feature (66)..(66): X is asparagine, or lysine
  Misc_feature (73)..(73): X is threonine or alanine
  Misc_feature (77)..(77): X is serine or asparagine
  Misc_feature (80)..(80): X is asparagine or lysine
  Misc_feature (90)..(90): X is alanine or aspartic acid
  Misc_feature (91)..(91): X is glycine or arginine
  Misc_feature (94)..(94): X is threonine or isoleucine
  Misc_feature (95)..(95): X is leucine or isoleucine
  Misc_feature (97)..(97): X is tryptophan or arginine
  Misc_feature (99)..(99): X is cysteine, tyrosine, phenylalanine, or serine
  Misc_feature (103)..(103): X is leucine or valine
  Misc_feature (113)..(113): X is tyrosine or histidine
  Misc_feature (114)..(114): X is aspartic acid or asparagine
  Misc_feature (116)..(116): X is tyrosine, phenylalanine, serine, or leucine
  Misc_feature (147)..(147): X is leucine or tryptophan
  Misc_feature (152)..(152): X is glutamic acid, alanine, or threonine
  Misc_feature (156)..(156): X is arginine, leucine, or tryptophan
  Misc_feature (163)..(163): X is leucine or threonine
  Misc_feature (173)..(173): X is glutamic acid or lysine
  Misc_feature (177)..(177): X is glutamic acid or lysine
  Misc_feature (184)..(184): X is histidine or proline
  Misc_feature (194)..(194): X is arginine or valine
  Misc_feature (219)..(219): X is tryptophan or arginine
  Misc_feature (248)..(248): X is valine or methionine
  Misc_feature (253)..(253): X is glutamic acid or lysine
  Misc_feature (261)..(261): X is methionine or valine
  Misc_feature (267)..(267): X is proline or glutamine
  Misc_feature (273)..(273): X is arginine or serine
  Misc_feature (275)..(275): X is proline or glycine

SEQ ID NO: 38 - protein, 284 aa, Artificial sequence; identical to SEQ ID NO: 32
  synthetic sequence
  misc_feature (89)..(89): Xaa is K or E
  misc_feature (107)..(107): Xaa is R or G
  misc_feature (157)..(157): Xaa is R or G
  misc_feature (158)..(158): Xaa is A or V
  misc_feature (255)..(255): Xaa is Q or P
  misc_feature (267)..(267): Xaa is P or S

SEQ ID NO: 39 - protein, 284 aa, Artificial sequence; identical to SEQ ID NO: 33
  synthetic sequence
  misc_feature (7)..(7): Xaa is Y or F
  misc_feature (50)..(50): Xaa is P or Q
  misc_feature (251)..(251): Xaa is S or P
  misc_feature (278)..(278): Xaa is P or L

SEQ ID NO: 40 - protein, 284 aa, Artificial sequence; identical to SEQ ID NO: 34
  synthetic sequence
  misc_feature (13)..(13): Xaa is S or F
  misc_feature (27)..(27): Xaa is Y or H
  misc_feature (31)..(31): Xaa is T, S, or M
  misc_feature (34)..(34): Xaa is L or V
  misc_feature (54)..(54): Xaa is Q or R
  misc_feature (81)..(81): Xaa is P or L
  misc_feature (100)..(100): Xaa is G or D
  misc_feature (104)..(104): Xaa is G or V
  misc_feature (105)..(105): Xaa is S or C
  misc_feature (110)..(110): Xaa is L or I
  misc_feature (159)..(159): Xaa is Y or H
  misc_feature (169)..(169): Xaa is H or R
  misc_feature (171)..(171): Xaa is Y or H
  misc_feature (178)..(178): Xaa is M or T
  misc_feature (185)..(185): Xaa is P or A
  misc_feature (219)..(219): Xaa is R, W, or Q
  misc_feature (258)..(258): Xaa is T or M
  misc_feature (275)..(275): Xaa is K or E

SEQ ID NO: 41 - protein, 275 aa, Homo sapiens
GSHSMRYFFTSVSRPGRGEPRFIAVGYVDDTQFVRFDSDAASQKMEPRAPWIEQEGPEYWDQETRNMKAHSQTDRANLGTLRGYYNQSEDGSHTIQIMYGCDVGPDGRFLRGYRQDAYDGKDYIALNEDLRSWTAADMAAQITKRKWEAVHAAEQRRVYLEGRCVDGLRRYLENGKETLQRTDPPKTHMTHHPISDHEATLRCWALGFYPAEITLTWQRDGEDQTQDTELVETRPAGDGTFQKWAAVVVPSGEEQRYTCHVQHEGLPKPLTLRWE

SEQ ID NO: 42 - protein, 275 aa, Homo sapiens
GSHSMRYFYTSVSRPGRGEPRFISVGYVDDTQFVRFDSDAASPREEPRAPWIEQEGPEYWDRNTQIYKAQAQTDRESLRNLRGYYNQSEAGSHTLQSMYGCDVGPDGRLLRGHDQYAYDGKDYIALNEDLRSWTAADTAAQITQRKWEAAREAEQRRAYLEGECVEWLRRYLENGKDKLERADPPKTHVTHHPISDHEATLRCWALGFYPAEITLTWQRDGEDQTQDTELVETRPAGDRTFQKWAAVVVPSGEEQRYTCHVQHEGLPKPLTLRWE

SEQ ID NO: 43 - protein, 275 aa, Homo sapiens
CSHSMRYFDTAVSRPGRGEPRFISVGYVDDTQFVRFDSDAASPRGEPRAPWVEQEGPEYWDRETQNYKRQAQADRVSLRNLRGYYNQSEDGSHTLQRMYGCDLGPDGRLLRGYDQSAYDGKDYIALNEDLRSWTAADTAAQITQRKLEAARAAEQLRAYLEGTCVEWLRRYLENGKETLQRAEPPKTHVTHHPLSDHEATLRCWALGFYPAEITLTWQRDGEDQTQDTELVETRPAGDGTFQKWAAVVVPSGQEQRYTCHMQHEGLQEPLTLSWE

SEQ ID NO: 44 - protein, 276 aa, Homo sapiens [sequence omitted]

SEQ ID NO: 45 - protein, 274 aa, Mus musculus
GPHSLRYFVTAVSRPGLGEPRFIAVGYVDDTQFVRFDSDADNPRFEPRAPWMEQEGPEYWEEQTQRAKSDEQWFRVSLRTAQRYYNQSKGGSHTFQRMFGCDVGSDWRLLRGYQQFAYDGRDYIALNEDLKTWTAADTAALITRRKWEQAGDAEYYRAYLEGECVEWLRRYLELGNETLLRTDSPKAHVTYHPRSQVDVTLRCWALGFYPADITLTWQLNGEDLTQDMELVETRPAGDGTFQKWAAVVVPLGKEQNYTCHVHHKGLPEPLTLRW

SEQ ID NO: 46 - protein, 275 aa, Artificial sequence
  synthetic sequence
GSHSMRYFFTSVSRPGRGEPRFIAVGYVDDTQFVRFDSDAASQRMEPRAPWIEQEGPEYWDGETRKVKAHSQTHRVDLGTLRGAYNQSEAGSHTVQRMYGCDVGSDWRFLRGYHQYAYDGKDYIALKEDLRSWTAADMAAQTTKHKWEAAHVAEQLRAYLEGTCVEWLRRYLENGKETLQRTDAPKTHMTHHAVSDHEATLRCWALSFYPAEITLTWQRDGEDQTQDTELVETRPCGDGTFQKWAAVVVPSGQEQRYTCHVQHEGLPKPLTLRWE

SEQ ID NO: 47 - protein, 275 aa, Artificial sequence
  synthetic sequence
GSHSMRYFFTSVSRPGRGEPRFIAVGYVDDTQFVRFDSDAASQRMEPRAPWIEQEGPEYWDGETRKVKAHSQTHRVDLGTLRGCYNQSEAGSHTVQRMYGCDVGSDWRFLRGYHQYAYDGKDYIALKEDLRSWTAADMCAQTTKHKWEAAHVAEQLRAYLEGTCVEWLRRYLENGKETLQRTDAPKTHMTHHAVSDHEATLRCWALSFYPAEITLTWQRDGEDQTQDTELVETRPCGDGTFQKWAAVVVPSGQEQRYTCHVQHEGLPKPLTLRWE

SEQ ID NO: 48 - protein, 276 aa, Artificial sequence
  synthetic sequence
GSHSMRYFFTSVSRPGRGEPRFIAVGYVDDTQFVRFDSDAASQRMEPRAPWIEQEGPEYWDGETRKVKAHSQTHRVDLGTLRGAYNQSEAGSHTVQRMYGCDVGSDWRFLRGYHQYAYDGKDYIALKEDLRSWTAADMAAQTTKHKWEAAHVAEQLRAYLEGTCVEWLRRYLENGKETLQRTDAPKTHMTHHAVSDHEATLRCWALSFYPAEITLTWQRDGEDQTQDTELVETRPCGDGTFQKWAAVVVPSGQEQRYTCHVQHEGLPKPLTLRWEP

SEQ ID NO: 49 - protein, 276 aa, Homo sapiens
GSHSMRYFYTSVSRPGRGEPRFIAVGYVDDTQFVRFDSDAASQRMEPRAPWIEQEGPEYWDQETRNVKAQSQTDRVDLGTLRGYYNQSEDGSHTIQIMYGCDVGPDGRFLRGYRQDAYDGKDYIALNEDLRSWTAADMAAQITKRKWEAAHAAEQQRAYLEGRCVEWLRRYLENGKETLQRTDPPKTHMTHHPISDHEATLRCWALGFYPAEITLTWQRDGEDQTQDTELVETRPAGDGTFQKWAAVVVPSGEEQRYTCHVQHEGLPKPLTLRWEL

SEQ ID NO: 50 - protein, 276 aa, Homo sapiens
GSHSMRYFSTSVSRPGRGEPRFIAVGYVDDTQFVRFDSDAASQRMEPRAPWIEQEGPEYWDEETGKVKAHSQTDRENLRIALRYYNQSEAGSHTLQMMFGCDVGSDGRFLRGYHQYAYDGKDYIALKEDLRSWTAADMAAQITKRKWEAAHVAEQQRAYLEGTCVDGLRRYLENGKETLQRTDPPKTHMTHHPISDHEATLRCWALGFYPAEITLTWQRDGEDQTQDTELVETRPAGDGTFQKWAAVVVPSGEEQRYTCHVQHEGLPKPLTLRWEP

SEQ ID NO: 51 - protein, 276 aa, Homo sapiens
GSHSMRYFTTSVSRPGRGEPRFIAVGYVDDTQFVRFDSDAASQRMEPRAPWIEQEGPEYWDRNTRNVKAHSQIDRVDLGTLRGYYNQSEAGSHTIQMMYGCDVGSDGRFLRGYQQDAYDGKDYIALNEDLRSWTAADMAAQITQRKWEAARVAEQLRAYLEGTCVEWLRRYLENGKETLQRTDPPKTHMTHHAVSDHEATLRCWALSFYPAEITLTWQRDGEDQTQDTELVETRPAGDGTFQKWASVVVPSGQEQRYTCHVQHEGLPKPLTLRWEP

SEQ ID NO: 52 - protein, 219 aa, Artificial sequence
  synthetic sequence
  misc_feature (8)..(8): any amino acid other than aspartic acid
FTVTVPKXLYVVEYGSNMTIECKFPVEKQLDLAALIVYWEMEDKNIIQFVHGEEDLKVQHSSYRQRARLLKDQLSLGNAALQITDVKLQDAGVYRCMISYGGADYKRITVKVNAPYNKINQRILVVDPVTSEHELTCQAEGYPKAEVIWTSSDHQVLSGKTTTTNSKREEKLFNVTSTLRINTTTNEIFYCTFRRLDPEENHTAELVIPGNILNVSIKI

SEQ ID NO: 53 - protein, 219 aa, Artificial sequence
  synthetic sequence
  misc_feature (36)..(36): any amino acid other than isoleucine
FTVTVPKDLYVVEYGSNMTIECKFPVEKQLDLAALXVYWEMEDKNIIQFVHGEEDLKVQHSSYRQRARLLKDQLSLGNAALQITDVKLQDAGVYRCMISYGGADYKRITVKVNAPYNKINQRILVVDPVTSEHELTCQAEGYPKAEVIWTSSDHQVLSGKTTTTNSKREEKLFNVTSTLRINTTTNEIFYCTFRRLDPEENHTAELVIPGNILNVSIKI

SEQ ID NO: 54 - protein, 219 aa, Artificial sequence
  synthetic sequence
  misc_feature (54)..(54): any amino acid other than glutamine
FTVTVPKDLYVVEYGSNMTIECKFPVEKQLDLAALIVYWEMEDKNIIQFVHGEXDLKVQHSSYRQRARLLKDQLSLGNAALQITDVKLQDAGVYRCMISYGGADYKRITVKVNAPYNKINQRILVVDPVTSEHELTCQAEGYPKAEVIWTSSDHQVLSGKTTTTNSKREEKLFNVTSTLRINTTTNEIFYCTFRRLDPEENHTAELVIPGNILNVSIKI

SEQ ID NO: 55 - protein, 208 aa, Artificial sequence
  synthetic sequence
  misc_feature (19)..(19): any amino acid other than asparagine
VIHVTKEVKEVATLSCGHXVSVEELAQTRIYWQKEKKMVLTMMSGDMNIWPEYKNRTIFDITNNLSIVILALRPSDEGTYECVVLKYEKDAFKREHLAEVTLSVKADFPTPSISDFEIPTSNIRRIICSTSGGFPEPHLSWLENGEELNAINTTVSQDPETELYAVSSKLDFNMTTNHSFMCLIKYGHLRVNQTFNWNTTKQEHFPDN

SEQ ID NO: 56 - protein, 208 aa, Artificial sequence
  synthetic sequence
  misc_feature (63)..(63): any amino acid other than asparagine
VIHVTKEVKEVATLSCGHNVSVEELAQTRIYWQKEKKMVLTMMSGDMNIWPEYKNRTIFDITXNLSIVILALRPSDEGTYECVVLKYEKDAFKREHLAEVTLSVKADFPTPSISDFEIPTSNIRRIICSTSGGFPEPHLSWLENGEELNAINTTVSQDPETELYAVSSKLDFNMTTNHSFMCLIKYGHLRVNQTFNWNTTKQEHFPDN

SEQ ID NO: 57 - protein, 208 aa, Artificial sequence
  synthetic sequence
  misc_feature (67)..(67): any amino acid other than isoleucine
VIHVTKEVKEVATLSCGHNVSVEELAQTRIYWQKEKKMVLTMMSGDMNIWPEYKNRTIFDITNNLSXVILALRPSDEGTYECVVLKYEKDAFKREHLAEVTLSVKADFPTPSISDFEIPTSNIRRIICSTSGGFPEPHLSWLENGEELNAINTTVSQDPETELYAVSSKLDFNMTTNHSFMCLIKYGHLRVNQTFNWNTTKQEHFPDN

SEQ ID NO: 58 - protein, 208 aa, Artificial sequence
  synthetic sequence
  misc_feature (86)..(86): any amino acid other than lysine
VIHVTKEVKEVATLSCGHNVSVEELAQTRIYWQKEKKMVLTMMSGDMNIWPEYKNRTIFDITNNLSIVILALRPSDEGTYECVVLXYEKDAFKREHLAEVTLSVKADFPTPSISDFEIPTSNIRRIICSTSGGFPEPHLSWLENGEELNAINTTVSQDPETELYAVSSKLDFNMTTNHSFMCLIKYGHLRVNQTFNWNTTKQEHFPDN

SEQ ID NO: 59 - protein, 5 aa, Artificial sequence
  synthetic sequence
  misc_feature (4)..(4): any amino acid other than proline
VPGXG

SEQ ID NO: 60 - protein, 208 aa, Artificial sequence
  synthetic sequence
  misc_feature (157)..(157): any amino acid other than glutamine
VIHVTKEVKEVATLSCGHNVSVEELAQTRIYWQKEKKMVLTMMSGDMNIWPEYKNRTIFDITNNLSIVILALRPSDEGTYECVVLKYEKDAFKREHLAEVTLSVKADFPTPSISDFEIPTSNIRRIICSTSGGFPEPHLSWLENGEELNAINTTVSXDPETELYAVSSKLDFNMTTNHSFMCLIKYGHLRVNQTFNWNTTKQEHFPDN

SEQ ID NO: 61 - protein, 208 aa, Artificial sequence
  synthetic sequence
  misc_feature (158)..(158): any amino acid other than aspartic acid
VIHVTKEVKEVATLSCGHNVSVEELAQTRIYWQKEKKMVLTMMSGDMNIWPEYKNRTIFDITNNLSIVILALRPSDEGTYECVVLKYEKDAFKREHLAEVTLSVKADFPTPSISDFEIPTSNIRRIICSTSGGFPEPHLSWLENGEELNAINTTVSQXPETELYAVSSKLDFNMTTNHSFMCLIKYGHLRVNQTFNWNTTKQEHFPDN

SEQ ID NO: 62 - protein, 208 aa, Artificial sequence
  synthetic sequence
  misc_feature (25)..(25): any amino acid other than leucine
VIHVTKEVKEVATLSCGHNVSVEEXAQTRIYWQKEKKMVLTMMSGDMNIWPEYKNRTIFDITNNLSIVILALRPSDEGTYECVVLKYEKDAFKREHLAEVTLSVKADFPTPSISDFEIPTSNIRRIICSTSGGFPEPHLSWLENGEELNAINTTVSQDPETELYAVSSKLDFNMTTNHSFMCLIKYGHLRVNQTFNWNTTKQEHFPDN

SEQ ID NO: 63 - protein, 208 aa, Artificial sequence
  synthetic sequence
  misc_feature (31)..(31): any amino acid other than tyrosine
VIHVTKEVKEVATLSCGHNVSVEELAQTRIXWQKEKKMVLTMMSGDMNIWPEYKNRTIFDITNNLSIVILALRPSDEGTYECVVLKYEKDAFKREHLAEVTLSVKADFPTPSISDFEIPTSNIRRIICSTSGGFPEPHLSWLENGEELNAINTTVSQDPETELYAVSSKLDFNMTTNHSFMCLIKYGHLRVNQTFNWNTTKQEHFPDN

SEQ ID NO: 64 - protein, 208 aa, Artificial sequence
  synthetic sequence
  misc_feature (33)..(33): any amino acid other than glutamine
VIHVTKEVKEVATLSCGHNVSVEELAQTRIYWXKEKKMVLTMMSGDMNIWPEYKNRTIFDITNNLSIVILALRPSDEGTYECVVLKYEKDAFKREHLAEVTLSVKADFPTPSISDFEIPTSNIRRIICSTSGGFPEPHLSWLENGEELNAINTTVSQDPETELYAVSSKLDFNMTTNHSFMCLIKYGHLRVNQTFNWNTTKQEHFPDN

SEQ ID NO: 65 - protein, 208 aa, Artificial sequence
  synthetic sequence
  misc_feature (38)..(38): any amino acid other than methionine
VIHVTKEVKEVATLSCGHNVSVEELAQTRIYWQKEKKXVLTMMSGDMNIWPEYKNRTIFDITNNLSIVILALRPSDEGTYECVVLKYEKDAFKREHLAEVTLSVKADFPTPSISDFEIPTSNIRRIICSTSGGFPEPHLSWLENGEELNAINTTVSQDPETELYAVSSKLDFNMTTNHSFMCLIKYGHLRVNQTFNWNTTKQEHFPDN

SEQ ID NO: 66 - protein, 208 aa, Artificial sequence
  synthetic sequence
  misc_feature (39)..(39): any amino acid other than valine
VIHVTKEVKEVATLSCGHNVSVEELAQTRIYWQKEKKMXLTMMSGDMNIWPEYKNRTIFDITNNLSIVILALRPSDEGTYECVVLKYEKDAFKREHLAEVTLSVKADFPTPSISDFEIPTSNIRRIICSTSGGFPEPHLSWLENGEELNAINTTVSQDPETELYAVSSKLDFNMTTNHSFMCLIKYGHLRVNQTFNWNTTKQEHFPDN

SEQ ID NO: 67 - protein, 208 aa, Artificial sequence
  synthetic sequence
  misc_feature (49)..(49): any amino acid other than isoleucine
VIHVTKEVKEVATLSCGHNVSVEELAQTRIYWQKEKKMVLTMMSGDMNXWPEYKNRTIFDITNNLSIVILALRPSDEGTYECVVLKYEKDAFKREHLAEVTLSVKADFPTPSISDFEIPTSNIRRIICSTSGGFPEPHLSWLENGEELNAINTTVSQDPETELYAVSSKLDFNMTTNHSFMCLIKYGHLRVNQTFNWNTTKQEHFPDN

SEQ ID NO: 68 - protein, 208 aa, Artificial sequence
  synthetic sequence
  misc_feature (53)..(53): any amino acid other than tyrosine
VIHVTKEVKEVATLSCGHNVSVEELAQTRIYWQKEKKMVLTMMSGDMNIWPEXKNRTIFDITNNLSIVILALRPSDEGTYECVVLKYEKDAFKREHLAEVTLSVKADFPTPSISDFEIPTSNIRRIICSTSGGFPEPHLSWLENGEELNAINTTVSQDPETELYAVSSKLDFNMTTNHSFMCLIKYGHLRVNQTFNWNTTKQEHFPDN

SEQ ID NO: 69 - protein, 208 aa, Artificial sequence
  synthetic sequence
  misc_feature (60)..(60): any amino acid other than aspartic acid
VIHVTKEVKEVATLSCGHNVSVEELAQTRIYWQKEKKMVLTMMSGDMNIWPEYKNRTIFXITNNLSIVILALRPSDEGTYECVVLKYEKDAFKREHLAEVTLSVKADFPTPSISDFEIPTSNIRRIICSTSGGFPEPHLSWLENGEELNAINTTVSQDPETELYAVSSKLDFNMTTNHSFMCLIKYGHLRVNQTFNWNTTKQEHFPDN

SEQ ID NO: 70 - protein, 208 aa, Artificial sequence
  synthetic sequence
  misc_feature (108)..(108): any amino acid other than phenylalanine
VIHVTKEVKEVATLSCGHNVSVEELAQTRIYWQKEKKMVLTMMSGDMNIWPEYKNRTIFDITNNLSIVILALRPSDEGTYECVVLKYEKDAFKREHLAEVTLSVKADXPTPSISDFEIPTSNIRRIICSTSGGFPEPHLSWLENGEELNAINTTVSQDPETELYAVSSKLDFNMTTNHSFMCLIKYGHLRVNQTFNWNTTKQEHFPDN

SEQ ID NO: 71 - protein, 208 aa, Artificial sequence
  synthetic sequence
  misc_feature (156)..(156): any amino acid other than serine
VIHVTKEVKEVATLSCGHNVSVEELAQTRIYWQKEKKMVLTMMSGDMNIWPEYKNRTIFDITNNLSIVILALRPSDEGTYECVVLKYEKDAFKREHLAEVTLSVKADFPTPSISDFEIPTSNIRRIICSTSGGFPEPHLSWLENGEELNAINTTVXQDPETELYAVSSKLDFNMTTNHSFMCLIKYGHLRVNQTFNWNTTKQEHFPDN

SEQ ID NO: 72 - protein, 208 aa, Artificial sequence
  synthetic sequence
  misc_feature (111)..(111): any amino acid other than proline
VIHVTKEVKEVATLSCGHNVSVEELAQTRIYWQKEKKMVLTMMSGDMNIWPEYKNRTIFDITNNLSIVILALRPSDEGTYECVVLKYEKDAFKREHLAEVTLSVKADFPTXSISDFEIPTSNIRRIICSTSGGFPEPHLSWLENGEELNAINTTVSQDPETELYAVSSKLDFNMTTNHSFMCLIKYGHLRVNQTFNWNTTKQEHFPDN

SEQ ID NO: 73 - protein, 224 aa, Artificial sequence
  synthetic sequence
  misc_feature (61)..(61): any amino acid other than asparagine
APLKIQAYFNETADLPCQFANSQNQSLSELVVFWQDQENLVLNEVYLGKEKFDSVHSKYMXRTSFDSDSWTLRLHNLQIKDKGLYQCIIHHKKPTGMIRIHQMNSELSVLANFSQPEIVPISNITENVYINLTCSSIHGYPEPKKMSVLLRTKNSTIEYDGIMQKSQDNVTELYDVSISLSVSFPDVTSNMTIFCILETDKTRLLSSPFSIELEDPQPPPDHIP

SEQ ID NO: 74 - protein, 224 aa, Artificial sequence
  synthetic sequence
  misc_feature (66)..(66): any amino acid other than aspartic acid
APLKIQAYFNETADLPCQFANSQNQSLSELVVFWQDQENLVLNEVYLGKEKFDSVHSKYMNRTSFXSDSWTLRLHNLQIKDKGLYQCIIHHKKPTGMIRIHQMNSELSVLANFSQPEIVPISNITENVYINLTCSSIHGYPEPKKMSVLLRTKNSTIEYDGIMQKSQDNVTELYDVSISLSVSFPDVTSNMTIFCILETDKTRLLSSPFSIELEDPQPPPDHIP

SEQ ID NO: 75 - protein, 224 aa, Artificial sequence
  synthetic sequence
  misc_feature (70)..(70): any amino acid other than tryptophan
APLKIQAYFNETADLPCQFANSQNQSLSELVVFWQDQENLVLNEVYLGKEKFDSVHSKYMNRTSFDSDSXTLRLHNLQIKDKGLYQCIIHHKKPTGMIRIHQMNSELSVLANFSQPEIVPISNITENVYINLTCSSIHGYPEPKKMSVLLRTKNSTIEYDGIMQKSQDNVTELYDVSISLSVSFPDVTSNMTIFCILETDKTRLLSSPFSIELEDPQPPPDHIP

SEQ ID NO: 76 - protein, 224 aa, Artificial sequence
  synthetic sequence
  misc_feature (91)..(91): any amino acid other than histidine
APLKIQAYFNETADLPCQFANSQNQSLSELVVFWQDQENLVLNEVYLGKEKFDSVHSKYMNRTSFDSDSWTLRLHNLQIKDKGLYQCIIHXKKPTGMIRIHQMNSELSVLANFSQPEIVPISNITENVYINLTCSSIHGYPEPKKMSVLLRTKNSTIEYDGIMQKSQDNVTELYDVSISLSVSFPDVTSNMTIFCILETDKTRLLSSPFSIELEDPQPPPDHIP

SEQ ID NO: 77 - protein, 110 aa, Artificial sequence
  synthetic sequence
  misc_feature (61)..(61): any amino acid other than asparagine
APLKIQAYFNETADLPCQFANSQNQSLSELVVFWQDQENLVLNEVYLGKEKFDSVHSKYMXRTSFDSDSWTLRLHNLQIKDKGLYQCIIHHKKPTGMIRIHQMNSELSVL

SEQ ID NO: 78 - protein, 110 aa, Artificial sequence
  synthetic sequence
  misc_feature (66)..(66): any amino acid other than aspartic acid
APLKIQAYFNETADLPCQFANSQNQSLSELVVFWQDQENLVLNEVYLGKEKFDSVHSKYMNRTSFXSDSWTLRLHNLQIKDKGLYQCIIHHKKPTGMIRIHQMNSELSVL

SEQ ID NO: 79 - protein, 110 aa, Artificial sequence
  synthetic sequence
  misc_feature (70)..(70): any amino acid other than tryptophan
APLKIQAYFNETADLPCQFANSQNQSLSELVVFWQDQENLVLNEVYLGKEKFDSVHSKYMNRTSFDSDSXTLRLHNLQIKDKGLYQCIIHHKKPTGMIRIHQMNSELSVL

SEQ ID NO: 80 - protein, 110 aa, Artificial sequence
  synthetic sequence
  misc_feature (91)..(91): any amino acid other than histidine
APLKIQAYFNETADLPCQFANSQNQSLSELVVFWQDQENLVLNEVYLGKEKFDSVHSKYMNRTSFDSDSWTLRLHNLQIKDKGLYQCIIHXKKPTGMIRIHQMNSELSVL

SEQ ID NO: 81 - protein, 224 aa, Artificial sequence
  synthetic sequence
  misc_feature (41)..(41): any amino acid other than valine
APLKIQAYFNETADLPCQFANSQNQSLSELVVFWQDQENLXLNEVYLGKEKFDSVHSKYMNRTSFDSDSWTLRLHNLQIKDKGLYQCIIHHKKPTGMIRIHQMNSELSVLANFSQPEIVPISNITENVYINLTCSSIHGYPEPKKMSVLLRTKNSTIEYDGIMQKSQDNVTELYDVSISLSVSFPDVTSNMTIFCILETDKTRLLSSPFSIELEDPQPPPDHIP

SEQ ID NO: 82 - protein, 110 aa, Artificial sequence
  synthetic sequence
  misc_feature (41)..(41): any amino acid other than valine
APLKIQAYFNETADLPCQFANSQNQSLSELVVFWQDQENLXLNEVYLGKEKFDSVHSKYMNRTSFDSDSWTLRLHNLQIKDKGLYQCIIHHKKPTGMIRIHQMNSELSVL

SEQ ID NO: 83 - protein, 224 aa, Artificial sequence
  synthetic sequence
  misc_feature (35)..(35): any amino acid other than glutamine
APLKIQAYFNETADLPCQFANSQNQSLSELVVFWXDQENLVLNEVYLGKEKFDSVHSKYMNRTSFDSDSWTLRLHNLQIKDKGLYQCIIHHKKPTGMIRIHQMNSELSVLANFSQPEIVPISNITENVYINLTCSSIHGYPEPKKMSVLLRTKNSTIEYDGIMQKSQDNVTELYDVSISLSVSFPDVTSNMTIFCILETDKTRLLSSPFSIELEDPQPPPDHIP

SEQ ID NO: 84 - protein, 110 aa, Artificial sequence
  synthetic sequence
  misc_feature (35)..(35): any amino acid other than glutamine
APLKIQAYFNETADLPCQFANSQNQSLSELVVFWXDQENLVLNEVYLGKEKFDSVHSKYMNRTSFDSDSWTLRLHNLQIKDKGLYQCIIHHKKPTGMIRIHQMNSELSVL

SEQ ID NO: 85 - protein, 224 aa, Artificial sequence
  synthetic sequence
  misc_feature (33)..(33): any amino acid other than phenylalanine
APLKIQAYFNETADLPCQFANSQNQSLSELVVXWQDQENLVLNEVYLGKEKFDSVHSKYMNRTSFDSDSWTLRLHNLQIKDKGLYQCIIHHKKPTGMIRIHQMNSELSVLANFSQPEIVPISNITENVYINLTCSSIHGYPEPKKMSVLLRTKNSTIEYDGIMQKSQDNVTELYDVSISLSVSFPDVTSNMTIFCILETDKTRLLSSPFSIELEDPQPPPDHIP

SEQ ID NO: 86 - protein, 110 aa, Artificial sequence
  synthetic sequence
  misc_feature (33)..(33): any amino acid other than phenylalanine
APLKIQAYFNETADLPCQFANSQNQSLSELVVXWQDQENLVLNEVYLGKEKFDSVHSKYMNRTSFDSDSWTLRLHNLQIKDKGLYQCIIHHKKPTGMIRIHQMNSELSVL

SEQ ID NO: 87 - protein, 224 aa, Artificial sequence
  synthetic sequence
  misc_feature (72)..(72): any amino acid other than leucine
APLKIQAYFNETADLPCQFANSQNQSLSELVVFWQDQENLVLNEVYLGKEKFDSVHSKYMNRTSFDSDSWTXRLHNLQIKDKGLYQCIIHHKKPTGMIRIHQMNSELSVLANFSQPEIVPISNITENVYINLTCSSIHGYPEPKKMSVLLRTKNSTIEYDGIMQKSQDNVTELYDVSISLSVSFPDVTSNMTIFCILETDKTRLLSSPFSIELEDPQPPPDHIP

SEQ ID NO: 88 - protein, 110 aa, Artificial sequence
  synthetic sequence
  misc_feature (72)..(72): any amino acid other than leucine
APLKIQAYFNETADLPCQFANSQNQSLSELVVFWQDQENLVLNEVYLGKEKFDSVHSKYMNRTSFDSDSWTXRLHNLQIKDKGLYQCIIHHKKPTGMIRIHQMNSELSVL

SEQ ID NO: 89 - protein, 224 aa, Artificial sequence
  synthetic sequence
  misc_feature (59)..(59): any amino acid other than tyrosine
APLKIQAYFNETADLPCQFANSQNQSLSELVVFWQDQENLVLNEVYLGKEKFDSVHSKXMNRTSFDSDSWTLRLHNLQIKDKGLYQCIIHHKKPTGMIRIHQMNSELSVLANFSQPEIVPISNITENVYINLTCSSIHGYPEPKKMSVLLRTKNSTIEYDGIMQKSQDNVTELYDVSISLSVSFPDVTSNMTIFCILETDKTRLLSSPFSIELEDPQPPPDHIP

SEQ ID NO: 90 - protein, 110 aa, Artificial sequence
  synthetic sequence
  misc_feature (59)..(59): any amino acid other than tyrosine
APLKIQAYFNETADLPCQFANSQNQSLSELVVFWQDQENLVLNEVYLGKEKFDSVHSKXMNRTSFDSDSWTLRLHNLQIKDKGLYQCIIHHKKPTGMIRIHQMNSELSVL

SEQ ID NO: 91 - protein, 224 aa, Artificial sequence
  synthetic sequence
  misc_feature (61)..(61): any amino acid other than asparagine
  misc_feature (91)..(91): any amino acid other than histidine
APLKIQAYFNETADLPCQFANSQNQSLSELVVFWQDQENLVLNEVYLGKEKFDSVHSKYMXRTSFDSDSWTLRLHNLQIKDKGLYQCIIHXKKPTGMIRIHQMNSELSVLANFSQPEIVPISNITENVYINLTCSSIHGYPEPKKMSVLLRTKNSTIEYDGIMQKSQDNVTELYDVSISLSVSFPDVTSNMTIFCILETDKTRLLSSPFSIELEDPQPPPDHIP

SEQ ID NO: 92 - protein, 110 aa, Artificial sequence
  synthetic sequence
  misc_feature (61)..(61): any amino acid other than asparagine
  misc_feature (91)..(91): any amino acid other than histidine
APLKIQAYFNETADLPCQFANSQNQSLSELVVFWQDQENLVLNEVYLGKEKFDSVHSKYMXRTSFDSDSWTLRLHNLQIKDKGLYQCIIHXKKPTGMIRIHQMNSELSVL

SEQ ID NO: 93 - protein, 224 aa, Artificial sequence
  synthetic sequence
  misc_feature (66)..(66): any amino acid other than aspartic acid
  misc_feature (91)..(91): any amino acid other than histidine
APLKIQAYFNETADLPCQFANSQNQSLSELVVFWQDQENLVLNEVYLGKEKFDSVHSKYMNRTSFXSDSWTLRLHNLQIKDKGLYQCIIHXKKPTGMIRIHQMNSELSVLANFSQPEIVPISNITENVYINLTCSSIHGYPEPKKMSVLLRTKNSTIEYDGIMQKSQDNVTELYDVSISLSVSFPDVTSNMTIFCILETDKTRLLSSPFSIELEDPQPPPDHIP

SEQ ID NO: 94 - protein, 110 aa, Artificial sequence
  synthetic sequence
  misc_feature (66)..(66): any amino acid other than asparagine
  misc_feature (91)..(91): Xaa can be any amino acid other than His
APLKIQAYFNETADLPCQFANSQNQSLSELVVFWQDQENLVLNEVYLGKEKFDSVHSKYMNRTSFXSDSWTLRLHNLQIKDKGLYQCIIHXKKPTGMIRIHQMNSELSVL

SEQ ID NO: 95 - protein, 224 aa, Artificial sequence
  synthetic sequence
  Misc_feature (61)..(61): any amino acid other than asparagine
  Misc_feature (66)..(66): any amino acid other than aspartic acid
  Misc_feature (91)..(91): any amino acid other than histidine
APLKIQAYFNETADLPCQFANSQNQSLSELVVFWQDQENLVLNEVYLGKEKFDSVHSKYMXRTSFXSDSWTLRLHNLQIKDKGLYQCIIHXKKPTGMIRIHQMNSELSVLANFSQPEIVPISNITENVYINLTCSSIHGYPEPKKMSVLLRTKNSTIEYDGIMQKSQDNVTELYDVSISLSVSFPDVTSNMTIFCILETDKTRLLSSPFSIELEDPQPPPDHIP

SEQ ID NO: 96 - protein, 110 aa, Artificial sequence
  synthetic sequence
  Misc_feature (61)..(61): any amino acid other than asparagine
  Misc_feature (66)..(66): any amino acid other than aspartic acid
  Misc_feature (91)..(91): any amino acid other than histidine
APLKIQAYFNETADLPCQFANSQNQSLSELVVFWQDQENLVLNEVYLGKEKFDSVHSKYMXRTSFXSDSWTLRLHNLQIKDKGLYQCIIHXKKPTGMIRIHQMNSELSVL

SEQ ID NO: 97 - protein, 174 aa, Artificial sequence
  synthetic sequence
  misc_feature (47)..(47): any amino acid other than lysine
PAGLLDLRQGMFAQLVAQNVLLIDGPLSWYSDPGLAGVSLTGGLSYXEDTKELVVAKAGVYYVFFQLELRRVVAGEGSGSVSLALHLQPLRSAAGAAALALTVDLPPASSEARNSAFGFQGRLLHLSAGQRLGVHLHTEARARHAWQLTQGATVLGLFRVTPEIPAGLPSPRSE

SEQ ID NO: 98 - protein, 174 aa, Artificial sequence
  synthetic sequence
  misc_feature (147)..(147): any amino acid other than glutamine
PAGLLDLRQGMFAQLVAQNVLLIDGPLSWYSDPGLAGVSLTGGLSYKEDTKELVVAKAGVYYVFFQLELRRVVAGEGSGSVSLALHLQPLRSAAGAAALALTVDLPPASSEARNSAFGFQGRLLHLSAGQRLGVHLHTEARARHAWXLTQGATVLGLFRVTPEIPAGLPSPRSE

SEQ ID NO: 99 - protein, 174 aa, Artificial sequence
  synthetic sequence
  misc_feature (11)..(11): any amino acid other than methionine
PAGLLDLRQGXFAQLVAQNVLLIDGPLSWYSDPGLAGVSLTGGLSYKEDTKELVVAKAGVYYVFFQLELRRVVAGEGSGSVSLALHLQPLRSAAGAAALALTVDLPPASSEARNSAFGFQGRLLHLSAGQRLGVHLHTEARARHAWQLTQGATVLGLFRVTPEIPAGLPSPRSE

SEQ ID NO: 100 - protein, 174 aa, Artificial sequence
  synthetic sequence
  misc_feature (12)..(12): any amino acid other than phenylalanine
PAGLLDLRQGMXAQLVAQNVLLIDGPLSWYSDPGLAGVSLTGGLSYKEDTKELVVAKAGVYYVFFQLELRRVVAGEGSGSVSLALHLQPLRSAAGAAALALTVDLPPASSEARNSAFGFQGRLLHLSAGQRLGVHLHTEARARHAWQLTQGATVLGLFRVTPEIPAGLPSPRSE

SEQ ID NO: 101 - protein, 174 aa, Artificial sequence
  synthetic sequence
  misc_feature (14)..(14): any amino acid other than glutamine
PAGLLDLRQGMFAXLVAQNVLLIDGPLSWYSDPGLAGVSLTGGLSYKEDTKELVVAKAGVYYVFFQLELRRVVAGEGSGSVSLALHLQPLRSAAGAAALALTVDLPPASSEARNSAFGFQGRLLHLSAGQRLGVHLHTEARARHAWQLTQGATVLGLFRVTPEIPAGLPSPRSE

SEQ ID NO: 102 - protein, 174 aa, Artificial sequence
  synthetic sequence
  misc_feature (15)..(15): any amino acid other than leucine
PAGLLDLRQGMFAQXVAQNVLLIDGPLSWYSDPGLAGVSLTGGLSYKEDTKELVVAKAGVYYVFFQLELRRVVAGEGSGSVSLALHLQPLRSAAGAAALALTVDLPPASSEARNSAFGFQGRLLHLSAGQRLGVHLHTEARARHAWQLTQGATVLGLFRVTPEIPAGLPSPRSE

SEQ ID NO: 103 - protein, 174 aa, Artificial sequence
  synthetic sequence
  misc_feature (16)..(16): any amino acid other than valine
PAGLLDLRQGMFAQLXAQNVLLIDGPLSWYSDPGLAGVSLTGGLSYKEDTKELVVAKAGVYYVFFQLELRRVVAGEGSGSVSLALHLQPLRSAAGAAALALTVDLPPASSEARNSAFGFQGRLLHLSAGQRLGVHLHTEARARHAWQLTQGATVLGLFRVTPEIPAGLPSPRSE

SEQ ID NO: 104 - protein, 174 aa, Artificial sequence
  synthetic sequence
  misc_feature (18)..(18): any amino acid other than glutamine
PAGLLDLRQGMFAQLVAXNVLLIDGPLSWYSDPGLAGVSLTGGLSYKEDTKELVVAKAGVYYVFFQLELRRVVAGEGSGSVSLALHLQPLRSAAGAAALALTVDLPPASSEARNSAFGFQGRLLHLSAGQRLGVHLHTEARARHAWQLTQGATVLGLFRVTPEIPAGLPSPRSE

SEQ ID NO: 105 - protein, 174 aa, Artificial sequence
  synthetic sequence
  misc_feature (19)..(19): any amino acid other than asparagined
PAGLLDLRQGMFAQLVAQXVLLIDGPLSWYSDPGLAGVSLTGGLSYKEDTKELVVAKAGVYYVFFQLELRRVVAGEGSGSVSLALHLQPLRSAAGAAALALTVDLPPASSEARNSAFGFQGRLLHLSAGQRLGVHLHTEARARHAWQLTQGATVLGLFRVTPEIPAGLPSPRSE

SEQ ID NO: 106 - protein, 174 aa, Artificial sequence
  synthetic sequence
  misc_feature (20)..(20): any amino acid other than valine
PAGLLDLRQGMFAQLVAQNXLLIDGPLSWYSDPGLAGVSLTGGLSYKEDTKELVVAKAGVYYVFFQLELRRVVAGEGSGSVSLALHLQPLRSAAGAAALALTVDLPPASSEARNSAFGFQGRLLHLSAGQRLGVHLHTEARARHAWQLTQGATVLGLFRVTPEIPAGLPSPRSE

SEQ ID NO: 107 - protein, 174 aa, Artificial sequence
  synthetic sequence
  misc_feature (21)..(21): any amino acid other than leucine
PAGLLDLRQGMFAQLVAQNVXLIDGPLSWYSDPGLAGVSLTGGLSYKEDTKELVVAKAGVYYVFFQLELRRVVAGEGSGSVSLALHLQPLRSAAGAAALALTVDLPPASSEARNSAFGFQGRLLHLSAGQRLGVHLHTEARARHAWQLTQGATVLGLFRVTPEIPAGLPSPRSE

SEQ ID NO: 108 - protein, 174 aa, Artificial sequence
  synthetic sequence
  misc_feature (22)..(22): any amino acid other than leucine
PAGLLDLRQGMFAQLVAQNVLXIDGPLSWYSDPGLAGVSLTGGLSYKEDTKELVVAKAGVYYVFFQLELRRVVAGEGSGSVSLALHLQPLRSAAGAAALALTVDLPPASSEARNSAFGFQGRLLHLSAGQRLGVHLHTEARARHAWQLTQGATVLGLFRVTPEIPAGLPSPRSE

SEQ ID NO: 109 - protein, 174 aa, Artificial sequence
  synthetic sequence
  misc_feature (23)..(23): any amino acid other than isoleucine
PAGLLDLRQGMFAQLVAQNVLLXDGPLSWYSDPGLAGVSLTGGLSYKEDTKELVVAKAGVYYVFFQLELRRVVAGEGSGSVSLALHLQPLRSAAGAAALALTVDLPPASSEARNSAFGFQGRLLHLSAGQRLGVHLHTEARARHAWQLTQGATVLGLFRVTPEIPAGLPSPRSE

SEQ ID NO: 110 - protein, 174 aa, Artificial sequence
  synthetic sequence
  misc_feature (24)..(24): any amino acid other than aspartic acid
PAGLLDLRQGMFAQLVAQNVLLIXGPLSWYSDPGLAGVSLTGGLSYKEDTKELVVAKAGVYYVFFQLELRRVVAGEGSGSVSLALHLQPLRSAAGAAALALTVDLPPASSEARNSAFGFQGRLLHLSAGQRLGVHLHTEARARHAWQLTQGATVLGLFRVTPEIPAGLPSPRSE

SEQ ID NO: 111 - protein, 174 aa, Artificial sequence
  synthetic sequence
  misc_feature (25)..(25): any amino acid other than glycine
PAGLLDLRQGMFAQLVAQNVLLIDXPLSWYSDPGLAGVSLTGGLSYKEDTKELVVAKAGVYYVFFQLELRRVVAGEGSGSVSLALHLQPLRSAAGAAALALTVDLPPASSEARNSAFGFQGRLLHLSAGQRLGVHLHTEARARHAWQLTQGATVLGLFRVTPEIPAGLPSPRSE

SEQ ID NO: 112 - protein, 174 aa, Artificial sequence
  synthetic sequence
  misc_feature (26)..(26): any amino acid other than proline
PAGLLDLRQGMFAQLVAQNVLLIGGXLSWYSDPGLAGVSLTGGLSYKEDTKELVVAKAGVYYVFFQLELRRVVAGEGSGSVSLALHLQPLRSAAGAAALALTVDLPPASSEARNSAFGFQGRLLHLSAGQRLGVHLHTEARARHAWQLTQGATVLGLFRVTPEIPAGLPSPRSE

SEQ ID NO: 113 - protein, 174 aa, Artificial sequence
  synthetic sequence
  misc_feature (27)..(27): any amino acid other than leucine
PAGLLDLRQGMFAQLVAQNVLLIGGPXSWYSDPGLAGVSLTGGLSYKEDTKELVVAKAGVYYVFFQLELRRVVAGEGSGSVSLALHLQPLRSAAGAAALALTVDLPPASSEARNSAFGFQGRLLHLSAGQRLGVHLHTEARARHAWQLTQGATVLGLFRVTPEIPAGLPSPRSE

SEQ ID NO: 114 - protein, 174 aa, Artificial sequence
  synthetic sequence
  misc_feature (28)..(28): any amino acid other than serine
PAGLLDLRQGMFAQLVAQNVLLIGGPLXWYSDPGLAGVSLTGGLSYKEDTKELVVAKAGVYYVFFQLELRRVVAGEGSGSVSLALHLQPLRSAAGAAALALTVDLPPASSEARNSAFGFQGRLLHLSAGQRLGVHLHTEARARHAWQLTQGATVLGLFRVTPEIPAGLPSPRSE

SEQ ID NO: 115 - protein, 174 aa, Artificial sequence
  synthetic sequence
  misc_feature (29)..(29): any amino acid other than tryptophan
PAGLLDLRQGMFAQLVAQNVLLIGGPLSXYSDPGLAGVSLTGGLSYKEDTKELVVAKAGVYYVFFQLELRRVVAGEGSGSVSLALHLQPLRSAAGAAALALTVDLPPASSEARNSAFGFQGRLLHLSAGQRLGVHLHTEARARHAWQLTQGATVLGLFRVTPEIPAGLPSPRSE

SEQ ID NO: 116 - protein, 174 aa, Artificial sequence
  synthetic sequence
  misc_feature (30)..(30): any amino acid other than tyrosine
PAGLLDLRQGMFAQLVAQNVLLIGGPLSWXSDPGLAGVSLTGGLSYKEDTKELVVAKAGVYYVFFQLELRRVVAGEGSGSVSLALHLQPLRSAAGAAALALTVDLPPASSEARNSAFGFQGRLLHLSAGQRLGVHLHTEARARHAWQLTQGATVLGLFRVTPEIPAGLPSPRSE

SEQ ID NO: 117 - protein, 174 aa, Artificial sequence
  synthetic sequence
  misc_feature (31)..(31): any amino acid other than serine
PAGLLDLRQGMFAQLVAQNVLLIGGPLSWYXDPGLAGVSLTGGLSYKEDTKELVVAKAGVYYVFFQLELRRVVAGEGSGSVSLALHLQPLRSAAGAAALALTVDLPPASSEARNSAFGFQGRLLHLSAGQRLGVHLHTEARARHAWQLTQGATVLGLFRVTPEIPAGLPSPRSE

SEQ ID NO: 118 - protein, 174 aa, Artificial sequence
  synthetic sequence
  misc_feature (32)..(32): any amino acid other than aspartic acid
PAGLLDLRQGMFAQLVAQNVLLIGGPLSWYSXPGLAGVSLTGGLSYKEDTKELVVAKAGVYYVFFQLELRRVVAGEGSGSVSLALHLQPLRSAAGAAALALTVDLPPASSEARNSAFGFQGRLLHLSAGQRLGVHLHTEARARHAWQLTQGATVLGLFRVTPEIPAGLPSPRSE

SEQ ID NO: 119 - protein, 174 aa, Artificial sequence
  synthetic sequence
  misc_feature (33)..(33): any amino acid other than proline
PAGLLDLRQGMFAQLVAQNVLLIGGPLSWYSDXGLAGVSLTGGLSYKEDTKELVVAKAGVYYVFFQLELRRVVAGEGSGSVSLALHLQPLRSAAGAAALALTVDLPPASSEARNSAFGFQGRLLHLSAGQRLGVHLHTEARARHAWQLTQGATVLGLFRVTPEIPAGLPSPRSE

SEQ ID NO: 120 - protein, 174 aa, Artificial sequence
  synthetic sequence
  misc_feature (34)..(34): any amino acid other than glycine
PAGLLDLRQGMFAQLVAQNVLLIGGPLSWYSDPXLAGVSLTGGLSYKEDTKELVVAKAGVYYVFFQLELRRVVAGEGSGSVSLALHLQPLRSAAGAAALALTVDLPPASSEARNSAFGFQGRLLHLSAGQRLGVHLHTEARARHAWQLTQGATVLGLFRVTPEIPAGLPSPRSE

SEQ ID NO: 121 - protein, 174 aa, Artificial sequence
  synthetic sequence
  misc_feature (35)..(35): any amino acid other than leucine
PAGLLDLRQGMFAQLVAQNVLLIGGPLSWYSDPGXAGVSLTGGLSYKEDTKELVVAKAGVYYVFFQLELRRVVAGEGSGSVSLALHLQPLRSAAGAAALALTVDLPPASSEARNSAFGFQGRLLHLSAGQRLGVHLHTEARARHAWQLTQGATVLGLFRVTPEIPAGLPSPRSE

SEQ ID NO: 122 - protein, 174 aa, Artificial sequence
  synthetic sequence
  misc_feature (37)..(37): any amino acid other than glycine
PAGLLDLRQGMFAQLVAQNVLLIGGPLSWYSDPGLAXVSLTGGLSYKEDTKELVVAKAGVYYVFFQLELRRVVAGEGSGSVSLALHLQPLRSAAGAAALALTVDLPPASSEARNSAFGFQGRLLHLSAGQRLGVHLHTEARARHAWQLTQGATVLGLFRVTPEIPAGLPSPRSE

SEQ ID NO: 123 - protein, 174 aa, Artificial sequence
  synthetic sequence
  misc_feature (38)..(38): any amino acid other than valine
PAGLLDLRQGMFAQLVAQNVLLIGGPLSWYSDPGLAGXSLTGGLSYKEDTKELVVAKAGVYYVFFQLELRRVVAGEGSGSVSLALHLQPLRSAAGAAALALTVDLPPASSEARNSAFGFQGRLLHLSAGQRLGVHLHTEARARHAWQLTQGATVLGLFRVTPEIPAGLPSPRSE

SEQ ID NO: 124 - protein, 174 aa, Artificial sequence
  synthetic sequence
  misc_feature (39)..(39): any amino acid other than serine
PAGLLDLRQGMFAQLVAQNVLLIGGPLSWYSDPGLAGVXLTGGLSYKEDTKELVVAKAGVYYVFFQLELRRVVAGEGSGSVSLALHLQPLRSAAGAAALALTVDLPPASSEARNSAFGFQGRLLHLSAGQRLGVHLHTEARARHAWQLTQGATVLGLFRVTPEIPAGLPSPRSE

SEQ ID NO: 125 - protein, 174 aa, Artificial sequence
  synthetic sequence
  misc_feature (40)..(40): any amino acid other than leucine
PAGLLDLRQGMFAQLVAQNVLLIGGPLSWYSDPGLAGVSXTGGLSYKEDTKELVVAKAGVYYVFFQLELRRVVAGEGSGSVSLALHLQPLRSAAGAAALALTVDLPPASSEARNSAFGFQGRLLHLSAGQRLGVHLHTEARARHAWQLTQGATVLGLFRVTPEIPAGLPSPRSE

SEQ ID NO: 126 - protein, 174 aa, Artificial sequence
  synthetic sequence
  misc_feature (41)..(41): any amino acid other than threonine
PAGLLDLRQGMFAQLVAQNVLLIGGPLSWYSDPGLAGVSLXGGLSYKEDTKELVVAKAGVYYVFFQLELRRVVAGEGSGSVSLALHLQPLRSAAGAAALALTVDLPPASSEARNSAFGFQGRLLHLSAGQRLGVHLHTEARARHAWQLTQGATVLGLFRVTPEIPAGLPSPRSE

SEQ ID NO: 127 - protein, 174 aa, Artificial sequence
  synthetic sequence
  misc_feature (42)..(42): any amino acid other than glycine
PAGLLDLRQGMFAQLVAQNVLLIGGPLSWYSDPGLAGVSLTXGLSYKEDTKELVVAKAGVYYVFFQLELRRVVAGEGSGSVSLALHLQPLRSAAGAAALALTVDLPPASSEARNSAFGFQGRLLHLSAGQRLGVHLHTEARARHAWQLTQGATVLGLFRVTPEIPAGLPSPRSE

SEQ ID NO: 128 - protein, 174 aa, Artificial sequence
  synthetic sequence
  misc_feature (43)..(43): any amino acid other than glycine
PAGLLDLRQGMFAQLVAQNVLLIGGPLSWYSDPGLAGVSLTGXLSYKEDTKELVVAKAGVYYVFFQLELRRVVAGEGSGSVSLALHLQPLRSAAGAAALALTVDLPPASSEARNSAFGFQGRLLHLSAGQRLGVHLHTEARARHAWQLTQGATVLGLFRVTPEIPAGLPSPRSE

SEQ ID NO: 129 - protein, 174 aa, Artificial sequence
  synthetic sequence
  misc_feature (44)..(44): any amino acid other than leucine
PAGLLDLRQGMFAQLVAQNVLLIGGPLSWYSDPGLAGVSLTGGXSYKEDTKELVVAKAGVYYVFFQLELRRVVAGEGSGSVSLALHLQPLRSAAGAAALALTVDLPPASSEARNSAFGFQGRLLHLSAGQRLGVHLHTEARARHAWQLTQGATVLGLFRVTPEIPAGLPSPRSE

SEQ ID NO: 130 - protein, 174 aa, Artificial sequence
  synthetic sequence
  misc_feature (45)..(45): any amino acid other than serine
PAGLLDLRQGMFAQLVAQNVLLIGGPLSWYSDPGLAGVSLTGGLXYKEDTKELVVAKAGVYYVFFQLELRRVVAGEGSGSVSLALHLQPLRSAAGAAALALTVDLPPASSEARNSAFGFQGRLLHLSAGQRLGVHLHTEARARHAWQLTQGATVLGLFRVTPEIPAGLPSPRSE

SEQ ID NO: 131 - protein, 174 aa, Artificial sequence
  synthetic sequence
  misc_feature (46)..(46): any amino acid other than tyrosine
PAGLLDLRQGMFAQLVAQNVLLIGGPLSWYSDPGLAGVSLTGGLSXKEDTKELVVAKAGVYYVFFQLELRRVVAGEGSGSVSLALHLQPLRSAAGAAALALTVDLPPASSEARNSAFGFQGRLLHLSAGQRLGVHLHTEARARHAWQLTQGATVLGLFRVTPEIPAGLPSPRSE

SEQ ID NO: 132 - protein, 174 aa, Artificial sequence
  synthetic sequence
  misc_feature (48)..(48): any amino acid other than glutamic acid
PAGLLDLRQGMFAQLVAQNVLLIGGPLSWYSDPGLAGVSLTGGLSYKXDTKELVVAKAGVYYVFFQLELRRVVAGEGSGSVSLALHLQPLRSAAGAAALALTVDLPPASSEARNSAFGFQGRLLHLSAGQRLGVHLHTEARARHAWQLTQGATVLGLFRVTPEIPAGLPSPRSE

SEQ ID NO: 133 - protein, 174 aa, Artificial sequence
  synthetic sequence
  misc_feature (49)..(49): any amino acid other than aspartic acid
PAGLLDLRQGMFAQLVAQNVLLIGGPLSWYSDPGLAGVSLTGGLSYKEXTKELVVAKAGVYYVFFQLELRRVVAGEGSGSVSLALHLQPLRSAAGAAALALTVDLPPASSEARNSAFGFQGRLLHLSAGQRLGVHLHTEARARHAWQLTQGATVLGLFRVTPEIPAGLPSPRSE

SEQ ID NO: 134 - protein, 174 aa, Artificial sequence
  synthetic sequence
  misc_feature (50)..(50): any amino acid other than threonine
PAGLLDLRQGMFAQLVAQNVLLIGGPLSWYSDPGLAGVSLTGGLSYKEDXKELVVAKAGVYYVFFQLELRRVVAGEGSGSVSLALHLQPLRSAAGAAALALTVDLPPASSEARNSAFGFQGRLLHLSAGQRLGVHLHTEARARHAWQLTQGATVLGLFRVTPEIPAGLPSPRSE

SEQ ID NO: 135 - protein, 174 aa, Artificial sequence
  synthetic sequence
  misc_feature (51)..(51): any amino acid other than lysine
PAGLLDLRQGMFAQLVAQNVLLIGGPLSWYSDPGLAGVSLTGGLSYKEDTXELVVAKAGVYYVFFQLELRRVVAGEGSGSVSLALHLQPLRSAAGAAALALTVDLPPASSEARNSAFGFQGRLLHLSAGQRLGVHLHTEARARHAWQLTQGATVLGLFRVTPEIPAGLPSPRSE

SEQ ID NO: 136 - protein, 174 aa, Artificial sequence
  synthetic sequence
  misc_feature (52)..(52): any amino acid other than glutamic acid
PAGLLDLRQGMFAQLVAQNVLLIGGPLSWYSDPGLAGVSLTGGLSYKEDTKXLVVAKAGVYYVFFQLELRRVVAGEGSGSVSLALHLQPLRSAAGAAALALTVDLPPASSEARNSAFGFQGRLLHLSAGQRLGVHLHTEARARHAWQLTQGATVLGLFRVTPEIPAGLPSPRSE

SEQ ID NO: 137 - protein, 174 aa, Artificial sequence
  synthetic sequence
  misc_feature (64)..(64): any amino acid other than phenylalanine
PAGLLDLRQGMFAQLVAQNVLLIGGPLSWYSDPGLAGVSLTGGLSYKEDTKELVVAKAGVYYVXFQLELRRVVAGEGSGSVSLALHLQPLRSAAGAAALALTVDLPPASSEARNSAFGFQGRLLHLSAGQRLGVHLHTEARARHAWQLTQGATVLGLFRVTPEIPAGLPSPRSE

SEQ ID NO: 138 - protein, 174 aa, Artificial sequence
  synthetic sequence
  misc_feature (65)..(65): any amino acid other than phenylalanine
PAGLLDLRQGMFAQLVAQNVLLIGGPLSWYSDPGLAGVSLTGGLSYKEDTKELVVAKAGVYYVFXQLELRRVVAGEGSGSVSLALHLQPLRSAAGAAALALTVDLPPASSEARNSAFGFQGRLLHLSAGQRLGVHLHTEARARHAWQLTQGATVLGLFRVTPEIPAGLPSPRSE

SEQ ID NO: 139 - protein, 174 aa, Artificial sequence
  synthetic sequence
  misc_feature (66)..(66): any amino acid other than glutamine
PAGLLDLRQGMFAQLVAQNVLLIGGPLSWYSDPGLAGVSLTGGLSYKEDTKELVVAKAGVYYVFFXLELRRVVAGEGSGSVSLALHLQPLRSAAGAAALALTVDLPPASSEARNSAFGFQGRLLHLSAGQRLGVHLHTEARARHAWQLTQGATVLGLFRVTPEIPAGLPSPRSE

SEQ ID NO: 140 - protein, 174 aa, Artificial sequence
  synthetic sequence
  misc_feature (67)..(67): any amino acid other than leucine
PAGLLDLRQGMFAQLVAQNVLLIGGPLSWYSDPGLAGVSLTGGLSYKEDTKELVVAKAGVYYVFFQXELRRVVAGEGSGSVSLALHLQPLRSAAGAAALALTVDLPPASSEARNSAFGFQGRLLHLSAGQRLGVHLHTEARARHAWQLTQGATVLGLFRVTPEIPAGLPSPRSE

SEQ ID NO: 141 - protein, 174 aa, Artificial sequence
  synthetic sequence
  misc_feature (68)..(68): any amino acid other than glutamic acid
PAGLLDLRQGMFAQLVAQNVLLIGGPLSWYSDPGLAGVSLTGGLSYKEDTKELVVAKAGVYYVFFQLXLRRVVAGEGSGSVSLALHLQPLRSAAGAAALALTVDLPPASSEARNSAFGFQGRLLHLSAGQRLGVHLHTEARARHAWQLTQGATVLGLFRVTPEIPAGLPSPRSE

SEQ ID NO: 142 - protein, 174 aa, Artificial sequence
  synthetic sequence
  misc_feature (69)..(69): any amino acid other than leucine
PAGLLDLRQGMFAQLVAQNVLLIGGPLSWYSDPGLAGVSLTGGLSYKEDTKELVVAKAGVYYVFFQLEXRRVVAGEGSGSVSLALHLQPLRSAAGAAALALTVDLPPASSEARNSAFGFQGRLLHLSAGQRLGVHLHTEARARHAWQLTQGATVLGLFRVTPEIPAGLPSPRSE

SEQ ID NO: 143 - protein, 174 aa, Artificial sequence
  synthetic sequence
  misc_feature (70)..(70): any amino acid other than arginine
PAGLLDLRQGMFAQLVAQNVLLIGGPLSWYSDPGLAGVSLTGGLSYKEDTKELVVAKAGVYYVFFQLELXRVVAGEGSGSVSLALHLQPLRSAAGAAALALTVDLPPASSEARNSAFGFQGRLLHLSAGQRLGVHLHTEARARHAWQLTQGATVLGLFRVTPEIPAGLPSPRSE

SEQ ID NO: 144 - protein, 174 aa, Artificial sequence
  synthetic sequence
  misc_feature (71)..(71): any amino acid other than arginine
PAGLLDLRQGMFAQLVAQNVLLIGGPLSWYSDPGLAGVSLTGGLSYKEDTKELVVAKAGVYYVFFQLELRXVVAGEGSGSVSLALHLQPLRSAAGAAALALTVDLPPASSEARNSAFGFQGRLLHLSAGQRLGVHLHTEARARHAWQLTQGATVLGLFRVTPEIPAGLPSPRSE

SEQ ID NO: 145 - protein, 174 aa, Artificial sequence
  synthetic sequence
  misc_feature (72)..(72): any amino acid other than valine
PAGLLDLRQGMFAQLVAQNVLLIGGPLSWYSDPGLAGVSLTGGLSYKEDTKELVVAKAGVYYVFFQLELRRXVAGEGSGSVSLALHLQPLRSAAGAAALALTVDLPPASSEARNSAFGFQGRLLHLSAGQRLGVHLHTEARARHAWQLTQGATVLGLFRVTPEIPAGLPSPRSE

SEQ ID NO: 146 - protein, 174 aa, Artificial sequence
  synthetic sequence
  misc_feature (73)..(73): any amino acid other than valine
PAGLLDLRQGMFAQLVAQNVLLIGGPLSWYSDPGLAGVSLTGGLSYKEDTKELVVAKAGVYYVFFQLELRRVXAGEGSGSVSLALHLQPLRSAAGAAALALTVDLPPASSEARNSAFGFQGRLLHLSAGQRLGVHLHTEARARHAWQLTQGATVLGLFRVTPEIPAGLPSPRSE

SEQ ID NO: 147 - protein, 174 aa, Artificial sequence
  synthetic sequence
  misc_feature (75)..(75): any amino acid other than glycine
PAGLLDLRQGMFAQLVAQNVLLIGGPLSWYSDPGLAGVSLTGGLSYKEDTKELVVAKAGVYYVFFQLELRRVVAXEGSGSVSLALHLQPLRSAAGAAALALTVDLPPASSEARNSAFGFQGRLLHLSAGQRLGVHLHTEARARHAWQLTQGATVLGLFRVTPEIPAGLPSPRSE

SEQ ID NO: 148 - protein, 174 aa, Artificial sequence
  synthetic sequence
  misc_feature (76)..(76): any amino acid other than glutamic acid
PAGLLDLRQGMFAQLVAQNVLLIGGPLSWYSDPGLAGVSLTGGLSYKEDTKELVVAKAGVYYVFFQLELRRVVAGXGSGSVSLALHLQPLRSAAGAAALALTVDLPPASSEARNSAFGFQGRLLHLSAGQRLGVHLHTEARARHAWQLTQGATVLGLFRVTPEIPAGLPSPRSE

SEQ ID NO: 149 - protein, 174 aa, Artificial sequence
  synthetic sequence
  misc_feature (77)..(77): any amino acid other than glycine
PAGLLDLRQGMFAQLVAQNVLLIGGPLSWYSDPGLAGVSLTGGLSYKEDTKELVVAKAGVYYVFFQLELRRVVAGEXSGSVSLALHLQPLRSAAGAAALALTVDLPPASSEARNSAFGFQGRLLHLSAGQRLGVHLHTEARARHAWQLTQGATVLGLFRVTPEIPAGLPSPRSE

SEQ ID NO: 150 - protein, 174 aa, Artificial sequence
  synthetic sequence
  misc_feature (78)..(78): any amino acid other than serine
PAGLLDLRQGMFAQLVAQNVLLIGGPLSWYSDPGLAGVSLTGGLSYKEDTKELVVAKAGVYYVFFQLELRRVVAGEGXGSVSLALHLQPLRSAAGAAALALTVDLPPASSEARNSAFGFQGRLLHLSAGQRLGVHLHTEARARHAWQLTQGATVLGLFRVTPEIPAGLPSPRSE

SEQ ID NO: 151 - protein, 174 aa, Artificial sequence
  synthetic sequence
  misc_feature (104)..(104): any amino acid other than aspartic acid
PAGLLDLRQGMFAQLVAQNVLLIGGPLSWYSDPGLAGVSLTGGLSYKEDTKELVVAKAGVYYVFFQLELRRVVAGEGSGSVSLALHLQPLRSAAGAAALALTVXLPPASSEARNSAFGFQGRLLHLSAGQRLGVHLHTEARARHAWQLTQGATVLGLFRVTPEIPAGLPSPRSE

SEQ ID NO: 152 - protein, 174 aa, Artificial sequence
  synthetic sequence
  misc_feature (105)..(105): any amino acid other than leucine
PAGLLDLRQGMFAQLVAQNVLLIGGPLSWYSDPGLAGVSLTGGLSYKEDTKELVVAKAGVYYVFFQLELRRVVAGEGSGSVSLALHLQPLRSAAGAAALALTVDXPPASSEARNSAFGFQGRLLHLSAGQRLGVHLHTEARARHAWQLTQGATVLGLFRVTPEIPAGLPSPRSE

SEQ ID NO: 153 - protein, 174 aa, Artificial sequence
  synthetic sequence
  misc_feature (106)..(106): any amino acid other than proline
PAGLLDLRQGMFAQLVAQNVLLIGGPLSWYSDPGLAGVSLTGGLSYKEDTKELVVAKAGVYYVFFQLELRRVVAGEGSGSVSLALHLQPLRSAAGAAALALTVDLXPASSEARNSAFGFQGRLLHLSAGQRLGVHLHTEARARHAWQLTQGATVLGLFRVTPEIPAGLPSPRSE

SEQ ID NO: 154 - protein, 174 aa, Artificial sequence
  synthetic sequence
  misc_feature (109)..(109): any amino acid other than serine
PAGLLDLRQGMFAQLVAQNVLLIGGPLSWYSDPGLAGVSLTGGLSYKEDTKELVVAKAGVYYVFFQLELRRVVAGEGSGSVSLALHLQPLRSAAGAAALALTVDLPPAXSEARNSAFGFQGRLLHLSAGQRLGVHLHTEARARHAWQLTQGATVLGLFRVTPEIPAGLPSPRSE

SEQ ID NO: 155 - protein, 174 aa, Artificial sequence
  synthetic sequence
  misc_feature (110)..(110): any amino acid other than serine
PAGLLDLRQGMFAQLVAQNVLLIGGPLSWYSDPGLAGVSLTGGLSYKEDTKELVVAKAGVYYVFFQLELRRVVAGEGSGSVSLALHLQPLRSAAGAAALALTVDLPPASXEARNSAFGFQGRLLHLSAGQRLGVHLHTEARARHAWQLTQGATVLGLFRVTPEIPAGLPSPRSE

SEQ ID NO: 156 - protein, 174 aa, Artificial sequence
  synthetic sequence
  misc_feature (111)..(111): any amino acid other than glutamic acid
PAGLLDLRQGMFAQLVAQNVLLIGGPLSWYSDPGLAGVSLTGGLSYKEDTKELVVAKAGVYYVFFQLELRRVVAGEGSGSVSLALHLQPLRSAAGAAALALTVDLPPASSXARNSAFGFQGRLLHLSAGQRLGVHLHTEARARHAWQLTQGATVLGLFRVTPEIPAGLPSPRSE

SEQ ID NO: 157 - protein, 174 aa, Artificial sequence
  synthetic sequence
  misc_feature (113)..(113): any amino acid other than arginine
PAGLLDLRQGMFAQLVAQNVLLIGGPLSWYSDPGLAGVSLTGGLSYKEDTKELVVAKAGVYYVFFQLELRRVVAGEGSGSVSLALHLQPLRSAAGAAALALTVDLPPASSEAXNSAFGFQGRLLHLSAGQRLGVHLHTEARARHAWQLTQGATVLGLFRVTPEIPAGLPSPRSE

SEQ ID NO: 158 - protein, 174 aa, Artificial sequence
  synthetic sequence
  misc_feature (114)..(114): any amino acid other than asparagine
PAGLLDLRQGMFAQLVAQNVLLIGGPLSWYSDPGLAGVSLTGGLSYKEDTKELVVAKAGVYYVFFQLELRRVVAGEGSGSVSLALHLQPLRSAAGAAALALTVDLPPASSEARXSAFGFQGRLLHLSAGQRLGVHLHTEARARHAWQLTQGATVLGLFRVTPEIPAGLPSPRSE

SEQ ID NO: 159 - protein, 174 aa, Artificial sequence
  synthetic sequence
  misc_feature (115)..(115): any amino acid other than serine
PAGLLDLRQGMFAQLVAQNVLLIGGPLSWYSDPGLAGVSLTGGLSYKEDTKELVVAKAGVYYVFFQLELRRVVAGEGSGSVSLALHLQPLRSAAGAAALALTVDLPPASSEARNXAFGFQGRLLHLSAGQRLGVHLHTEARARHAWQLTQGATVLGLFRVTPEIPAGLPSPRSE

SEQ ID NO: 160 - protein, 174 aa, Artificial sequence
  synthetic sequence
  misc_feature (117)..(117): any amino acid other than phenylalanine
PAGLLDLRQGMFAQLVAQNVLLIGGPLSWYSDPGLAGVSLTGGLSYKEDTKELVVAKAGVYYVFFQLELRRVVAGEGSGSVSLALHLQPLRSAAGAAALALTVDLPPASSEARNSAXGFQGRLLHLSAGQRLGVHLHTEARARHAWQLTQGATVLGLFRVTPEIPAGLPSPRSE

SEQ ID NO: 161 - protein, 174 aa, Artificial sequence
  synthetic sequence
  misc_feature (130)..(130): any amino acid other than glutamine
PAGLLDLRQGMFAQLVAQNVLLIGGPLSWYSDPGLAGVSLTGGLSYKEDTKELVVAKAGVYYVFFQLELRRVVAGEGSGSVSLALHLQPLRSAAGAAALALTVDLPPASSEARNSAFGFQGRLLHLSAGXRLGVHLHTEARARHAWQLTQGATVLGLFRVTPEIPAGLPSPRSE

SEQ ID NO: 162 - protein, 174 aa, Artificial sequence
  synthetic sequence
  misc_feature (131)..(131): any amino acid other than arginine
PAGLLDLRQGMFAQLVAQNVLLIGGPLSWYSDPGLAGVSLTGGLSYKEDTKELVVAKAGVYYVFFQLELRRVVAGEGSGSVSLALHLQPLRSAAGAAALALTVDLPPASSEARNSAFGFQGRLLHLSAGQXLGVHLHTEARARHAWQLTQGATVLGLFRVTPEIPAGLPSPRSE

SEQ ID NO: 163 - protein, 174 aa, Artificial sequence
  synthetic sequence
  misc_feature (132)..(132): any amino acid other than leucine
PAGLLDLRQGMFAQLVAQNVLLIGGPLSWYSDPGLAGVSLTGGLSYKEDTKELVVAKAGVYYVFFQLELRRVVAGEGSGSVSLALHLQPLRSAAGAAALALTVDLPPASSEARNSAFGFQGRLLHLSAGQRXGVHLHTEARARHAWQLTQGATVLGLFRVTPEIPAGLPSPRSE

SEQ ID NO: 164 - protein, 174 aa, Artificial sequence
  synthetic sequence
  misc_feature (133)..(133): any amino acid other than glycine
PAGLLDLRQGMFAQLVAQNVLLIGGPLSWYSDPGLAGVSLTGGLSYKEDTKELVVAKAGVYYVFFQLELRRVVAGEGSGSVSLALHLQPLRSAAGAAALALTVDLPPASSEARNSAFGFQGRLLHLSAGQRLXVHLHTEARARHAWQLTQGATVLGLFRVTPEIPAGLPSPRSE

SEQ ID NO: 165 - protein, 174 aa, Artificial sequence
  synthetic sequence
  misc_feature (134)..(134): any amino acid other than valine
PAGLLDLRQGMFAQLVAQNVLLIGGPLSWYSDPGLAGVSLTGGLSYKEDTKELVVAKAGVYYVFFQLELRRVVAGEGSGSVSLALHLQPLRSAAGAAALALTVDLPPASSEARNSAFGFQGRLLHLSAGQRLGXHLHTEARARHAWQLTQGATVLGLFRVTPEIPAGLPSPRSE

SEQ ID NO: 166 - protein, 174 aa, Artificial sequence
  synthetic sequence
  misc_feature (135)..(135): any amino acid other than histidine
PAGLLDLRQGMFAQLVAQNVLLIGGPLSWYSDPGLAGVSLTGGLSYKEDTKELVVAKAGVYYVFFQLELRRVVAGEGSGSVSLALHLQPLRSAAGAAALALTVDLPPASSEARNSAFGFQGRLLHLSAGQRLGVXLHTEARARHAWQLTQGATVLGLFRVTPEIPAGLPSPRSE

SEQ ID NO: 167 - protein, 174 aa, Artificial sequence
  synthetic sequence
  misc_feature (136)..(136): any amino acid other than leucine
PAGLLDLRQGMFAQLVAQNVLLIGGPLSWYSDPGLAGVSLTGGLSYKEDTKELVVAKAGVYYVFFQLELRRVVAGEGSGSVSLALHLQPLRSAAGAAALALTVDLPPASSEARNSAFGFQGRLLHLSAGQRLGVHXHTEARARHAWQLTQGATVLGLFRVTPEIPAGLPSPRSE

SEQ ID NO: 168 - protein, 174 aa, Artificial sequence
  synthetic sequence
  misc_feature (137)..(137): any amino acid other than histidine
PAGLLDLRQGMFAQLVAQNVLLIGGPLSWYSDPGLAGVSLTGGLSYKEDTKELVVAKAGVYYVFFQLELRRVVAGEGSGSVSLALHLQPLRSAAGAAALALTVDLPPASSEARNSAFGFQGRLLHLSAGQRLGVHLXTEARARHAWQLTQGATVLGLFRVTPEIPAGLPSPRSE

SEQ ID NO: 169 - protein, 174 aa, Artificial sequence
  synthetic sequence
  misc_feature (138)..(138): any amino acid other than threonine
PAGLLDLRQGMFAQLVAQNVLLIGGPLSWYSDPGLAGVSLTGGLSYKEDTKELVVAKAGVYYVFFQLELRRVVAGEGSGSVSLALHLQPLRSAAGAAALALTVDLPPASSEARNSAFGFQGRLLHLSAGQRLGVHLHXEARARHAWQLTQGATVLGLFRVTPEIPAGLPSPRSE

SEQ ID NO: 170 - protein, 174 aa, Artificial sequence
  synthetic sequence
  misc_feature (139)..(139): any amino acid other than glutamic acid
PAGLLDLRQGMFAQLVAQNVLLIGGPLSWYSDPGLAGVSLTGGLSYKEDTKELVVAKAGVYYVFFQLELRRVVAGEGSGSVSLALHLQPLRSAAGAAALALTVDLPPASSEARNSAFGFQGRLLHLSAGQRLGVHLHTXARARHAWQLTQGATVLGLFRVTPEIPAGLPSPRSE

SEQ ID NO: 171 - protein, 174 aa, Artificial sequence
  synthetic sequence
  misc_feature (141)..(141): any amino acid other than arginine
PAGLLDLRQGMFAQLVAQNVLLIGGPLSWYSDPGLAGVSLTGGLSYKEDTKELVVAKAGVYYVFFQLELRRVVAGEGSGSVSLALHLQPLRSAAGAAALALTVDLPPASSEARNSAFGFQGRLLHLSAGQRLGVHLHTEAXARHAWQLTQGATVLGLFRVTPEIPAGLPSPRSE

SEQ ID NO: 172 - protein, 174 aa, Artificial sequence
  synthetic sequence
  misc_feature (143)..(143): any amino acid other than arginine
PAGLLDLRQGMFAQLVAQNVLLIGGPLSWYSDPGLAGVSLTGGLSYKEDTKELVVAKAGVYYVFFQLELRRVVAGEGSGSVSLALHLQPLRSAAGAAALALTVDLPPASSEARNSAFGFQGRLLHLSAGQRLGVHLHTEARAXHAWQLTQGATVLGLFRVTPEIPAGLPSPRSE

SEQ ID NO: 173 - protein, 174 aa, Artificial sequence
  synthetic sequence
  misc_feature (144)..(144): any amino acid other than histidine
PAGLLDLRQGMFAQLVAQNVLLIGGPLSWYSDPGLAGVSLTGGLSYKEDTKELVVAKAGVYYVFFQLELRRVVAGEGSGSVSLALHLQPLRSAAGAAALALTVDLPPASSEARNSAFGFQGRLLHLSAGQRLGVHLHTEARARXAWQLTQGATVLGLFRVTPEIPAGLPSPRSE

SEQ ID NO: 174 - protein, 174 aa, Artificial sequence
  synthetic sequence
  misc_feature (146)..(146): any amino acid other than tryptophan
PAGLLDLRQGMFAQLVAQNVLLIGGPLSWYSDPGLAGVSLTGGLSYKEDTKELVVAKAGVYYVFFQLELRRVVAGEGSGSVSLALHLQPLRSAAGAAALALTVDLPPASSEARNSAFGFQGRLLHLSAGQRLGVHLHTEARARHAXQLTQGATVLGLFRVTPEIPAGLPSPRSE

SEQ ID NO: 175 - protein, 174 aa, Artificial sequence
  synthetic sequence
  misc_feature (148)..(148): any amino acid other than leucine
PAGLLDLRQGMFAQLVAQNVLLIGGPLSWYSDPGLAGVSLTGGLSYKEDTKELVVAKAGVYYVFFQLELRRVVAGEGSGSVSLALHLQPLRSAAGAAALALTVDLPPASSEARNSAFGFQGRLLHLSAGQRLGVHLHTEARARHAWQXTQGATVLGLFRVTPEIPAGLPSPRSE

SEQ ID NO: 176 - protein, 174 aa, Artificial sequence
  synthetic sequence
  misc_feature (149)..(149): any amino acid other than threonine
PAGLLDLRQGMFAQLVAQNVLLIGGPLSWYSDPGLAGVSLTGGLSYKEDTKELVVAKAGVYYVFFQLELRRVVAGEGSGSVSLALHLQPLRSAAGAAALALTVDLPPASSEARNSAFGFQGRLLHLSAGQRLGVHLHTEARARHAWQLXQGATVLGLFRVTPEIPAGLPSPRSE

SEQ ID NO: 177 - protein, 174 aa, Artificial sequence
  synthetic sequence
  misc_feature (150)..(150): any amino acid other than glutamine
PAGLLDLRQGMFAQLVAQNVLLIGGPLSWYSDPGLAGVSLTGGLSYKEDTKELVVAKAGVYYVFFQLELRRVVAGEGSGSVSLALHLQPLRSAAGAAALALTVDLPPASSEARNSAFGFQGRLLHLSAGQRLGVHLHTEARARHAWQLTXGATVLGLFRVTPEIPAGLPSPRSE

SEQ ID NO: 178 - protein, 174 aa, Artificial sequence
  synthetic sequence
  misc_feature (151)..(151): any amino acid other than glycine
PAGLLDLRQGMFAQLVAQNVLLIGGPLSWYSDPGLAGVSLTGGLSYKEDTKELVVAKAGVYYVFFQLELRRVVAGEGSGSVSLALHLQPLRSAAGAAALALTVDLPPASSEARNSAFGFQGRLLHLSAGQRLGVHLHTEARARHAWQLTQXATVLGLFRVTPEIPAGLPSPRSE

SEQ ID NO: 179 - protein, 174 aa, Artificial sequence
  synthetic sequence
  misc_feature (153)..(153): any amino acid other than threonine
PAGLLDLRQGMFAQLVAQNVLLIGGPLSWYSDPGLAGVSLTGGLSYKEDTKELVVAKAGVYYVFFQLELRRVVAGEGSGSVSLALHLQPLRSAAGAAALALTVDLPPASSEARNSAFGFQGRLLHLSAGQRLGVHLHTEARARHAWQLTQGAXVLGLFRVTPEIPAGLPSPRSE

SEQ ID NO: 180 - protein, 174 aa, Artificial sequence
  synthetic sequence
  misc_feature (154)..(154): any amino acid other than valine
PAGLLDLRQGMFAQLVAQNVLLIGGPLSWYSDPGLAGVSLTGGLSYKEDTKELVVAKAGVYYVFFQLELRRVVAGEGSGSVSLALHLQPLRSAAGAAALALTVDLPPASSEARNSAFGFQGRLLHLSAGQRLGVHLHTEARARHAWQLTQGATXLGLFRVTPEIPAGLPSPRSE

SEQ ID NO: 181 - protein, 133 aa, Artificial sequence
  synthetic sequence
  misc_feature (42)..(42): any amino acid other than phenylalanine
APTSSSTKKTQLQLEHLLLDLQMILNGINNYKNPKLTRMLTXKFYMPKKATELKHLQCLEEELKPLEEVLNLAQSKNFHLRPRDLISNINVIVLELKGSETTFMCEYADETATIVEFLNRWITFCQSIISTLT

SEQ ID NO: 182 - protein, 133 aa, Artificial sequence
  synthetic sequence
  misc_feature (20)..(20): any amino acid other than aspartic acid
APTSSSTKKTQLQLEHLLLXLQMILNGINNYKNPKLTRMLTFKFYMPKKATELKHLQCLEEELKPLEEVLNLAQSKNFHLRPRDLISNINVIVLELKGSETTFMCEYADETATIVEFLNRWITFCQSIISTLT

SEQ ID NO: 183 - protein, 133 aa, Artificial sequence
  synthetic sequence
  misc_feature (15)..(15): any amino acid other than glutamic acid
APTSSSTKKTQLQLXHLLLDLQMILNGINNYKNPKLTRMLTFKFYMPKKATELKHLQCLEEELKPLEEVLNLAQSKNFHLRPRDLISNINVIVLELKGSETTFMCEYADETATIVEFLNRWITFCQSIISTLT

SEQ ID NO: 184 - protein, 133 aa, Artificial sequence
  synthetic sequence
  misc_feature (16)..(16): any amino acid other than histidine
APTSSSTKKTQLQLEXLLLDLQMILNGINNYKNPKLTRMLTFKFYMPKKATELKHLQCLEEELKPLEEVLNLAQSKNFHLRPRDLISNINVIVLELKGSETTFMCEYADETATIVEFLNRWITFCQSIISTLT

SEQ ID NO: 185 - protein, 133 aa, Artificial sequence; identical to SEQ ID NO: 184
  synthetic sequence
  misc_feature (16)..(16): any amino acid other than histidine

SEQ ID NO: 186 - protein, 133 aa, Artificial sequence
  synthetic sequence
  misc_feature (45)..(45): any amino acid other than tyrosine
APTSSSTKKTQLQLEHLLLDLQMILNGINNYKNPKLTRMLTFKFXMPKKATELKHLQCLEEELKPLEEVLNLAQSKNFHLRPRDLISNINVIVLELKGSETTFMCEYADETATIVEFLNRWITFCQSIISTLT

SEQ ID NO: 187 - protein, 133 aa, Artificial sequence
  synthetic sequence
  misc_feature (126)..(126): any amino acid other than glutamine
APTSSSTKKTQLQLEHLLLDLQMILNGINNYKNPKLTRMLTFKFYMPKKATELKHLQCLEEELKPLEEVLNLAQSKNFHLRPRDLISNINVIVLELKGSETTFMCEYADETATIVEFLNRWITFCXSIISTLT

SEQ ID NO: 188 - protein, 133 aa, Artificial sequence
  synthetic sequence
  misc_feature (16)..(16): any amino acid other than histidine
  misc_feature (42)..(42): any amino acid other than phenylalanine
APTSSSTKKTQLQLEXLLLDLQMILNGINNYKNPKLTRMLTXKFYMPKKATELKHLQCLEEELKPLEEVLNLAQSKNFHLRPRDLISNINVIVLELKGSETTFMCEYADETATIVEFLNRWITFCQSIISTLT

SEQ ID NO: 189 - protein, 133 aa, Artificial sequence
  synthetic sequence
  misc_feature (20)..(20): any amino acid other than aspartic acid
  misc_feature (42)..(42): any amino acid other than phenylalanine
APTSSSTKKTQLQLEHLLLXLQMILNGINNYKNPKLTRMLTXKFYMPKKATELKHLQCLEEELKPLEEVLNLAQSKNFHLRPRDLISNINVIVLELKGSETTFMCEYADETATIVEFLNRWITFCQSIISTLT

SEQ ID NO: 190 - protein, 133 aa, Artificial sequence
  synthetic sequence
  Misc_feature (15)..(15): any amino acid other than glutamic aicd
  Misc_feature (20)..(20): any amino acid other than aspartic acid
  Misc_feature (42)..(42): any amino acid other than phenylalanine
APTSSSTKKTQLQLXHLLLXLQMILNGINNYKNPKLTRMLTXKFYMPKKATELKHLQCLEEELKPLEEVLNLAQSKNFHLRPRDLISNINVIVLELKGSETTFMCEYADETATIVEFLNRWITFCQSIISTLT

SEQ ID NO: 191 - protein, 133 aa, Artificial sequence
  synthetic sequence
  Misc_feature (16)..(16): any amino acid other than histidine
  Misc_feature (20)..(20): any amino acid other than aspartic acid
  Misc_feature (42)..(42): any amino acid other than phenylalanine
APTSSSTKKTQLQLEXLLLXLQMILNGINNYKNPKLTRMLTXKFYMPKKATELKHLQCLEEELKPLEEVLNLAQSKNFHLRPRDLISNINVIVLELKGSETTFMCEYADETATIVEFLNRWITFCQSIISTLT

SEQ ID NO: 192 - protein, 133 aa, Artificial sequence
  synthetic sequence
  Misc_feature (20)..(20): any amino acid other than aspartic acid
  Misc_feature (42)..(42): any amino acid other than phenylalanine
  Misc_feature (126)..(126): any amino acid other than glutamine
APTSSSTKKTQLQLEHLLLXLQMILNGINNYKNPKLTRMLTXKFYMPKKATELKHLQCLEEELKPLEEVLNLAQSKNFHLRPRDLISNINVIVLELKGSETTFMCEYADETATIVEFLNRWITFCXSIISTLT

SEQ ID NO: 193 - protein, 133 aa, Artificial sequence
  synthetic sequence
  Misc_feature (20)..(20): any amino acid other than aspartic acid
  Misc_feature (42)..(42): any amino acid other than phenylalanine
  Misc_feature (45)..(45): any amino acid other than tyrosine
APTSSSTKKTQLQLEHLLLXLQMILNGINNYKNPKLTRMLTXKFXMPKKATELKHLQCLEEELKPLEEVLNLAQSKNFHLRPRDLISNINVIVLELKGSETTFMCEYADETATIVEFLNRWITFCQSIISTLT

SEQ ID NO: 194 - protein, 133 aa, Artificial sequence
  synthetic sequence
  Misc_feature (16)..(16): any amino acid other than histidine
  Misc_feature (20)..(20): any amino acid other than aspartic acid
  Misc_feature (42)..(42): any amino acid other than phenylalanine
  Misc_feature (45)..(45): any amino acid other than tyrosine
APTSSSTKKTQLQLEXLLLXLQMILNGINNYKNPKLTRMLTXKFXMPKKATELKHLQCLEEELKPLEEVLNLAQSKNFHLRPRDLISNINVIVLELKGSETTFMCEYADETATIVEFLNRWITFCQSIISTLT

SEQ ID NO: 195 - protein, 133 aa, Artificial sequence
  synthetic sequence
  Misc_feature (20)..(20): any amino acid other than aspartic acid
  Misc_feature (42)..(42): any amino acid other than phenylalanine
  Misc_feature (45)..(45): any amino acid other than tyrosine
  Misc_feature (126)..(126): any amino acid other than glutamine
APTSSSTKKTQLQLEHLLLXLQMILNGINNYKNPKLTRMLTXKFXMPKKATELKHLQCLEEELKPLEEVLNLAQSKNFHLRPRDLISNINVIVLELKGSETTFMCEYADETATIVEFLNRWITFCXSIISTLT

SEQ ID NO: 196 - protein, 133 aa, Artificial sequence
  synthetic sequence
  Misc_feature (16)..(16): any amino acid other than histidine
  Misc_feature (20)..(20): any amino acid other than aspartic acid
  Misc_feature (42)..(42): any amino acid other than phenylalanine
  Misc_feature (45)..(45): any amino acid other than tyrosine
  Misc_feature (126)..(126): any amino acid other than glutamine
APTSSSTKKTQLQLEXLLLXLQMILNGINNYKNPKLTRMLTXKFXMPKKATELKHLQCLEEELKPLEEVLNLAQSKNFHLRPRDLISNINVIVLELKGSETTFMCEYADETATIVEFLNRWITFCXSIISTLT

SEQ ID NO: 197 - protein, 133 aa, Artificial sequence
  synthetic sequence
  Misc_feature (16)..(16): any amino acid other than histidine
  Misc_feature (42)..(42): any amino acid other than phenylalanine
  Misc_feature (126)..(126): any amino acid other than glutamine
APTSSSTKKTQLQLEXLLLDLQMILNGINNYKNPKLTRMLTXKFYMPKKATELKHLQCLEEELKPLEEVLNLAQSKNFHLRPRDLISNINVIVLELKGSETTFMCEYADETATIVEFLNRWITFCXSIISTLT

SEQ ID NO: 198 - protein, 276 aa, Artificial sequence
  synthetic sequence
GSHSMRYFFTSVSRPGRGEPRFIAVGYVDDTQFVRFDSDAASQKMEPRAPWIEQEGPEYWDQETRNMKAHSQTDRANLGTLRGYYNQSEDGSHTIQIMYGCDVGPDGRFLRGYRQDAYDGKDYIALNEDLRSWTAADMAAQITKRKWEAVHAAEQRRVYLEGRCVDGLRRYLENGKETLQRTDPPKTHMTHHPISDHEATLRCWALGFYPAEITLTWQRDGEDQTQDTELVETRPAGDGTFQKWAAVVVPSGEEQRYTCHVQHEGLPKPLTLRWEL

SEQ ID NO: 199 - protein, 276 aa, Artificial sequence [sequence omitted]

SEQ ID NO: 200 - protein, 276 aa, Artificial sequence
  synthetic sequence
GSHSMRYFFTSVSRPGRGEPRFIAVGYVDDTQFVRFDSDAASQRMEPRAPWIEQEGPEYWDQETRNVKAQSQTDRVDLGTLRGYYNQSEAGSHTIQIMYGCDVGSDGRFLRGYRQDAYDGKDYIALNEDLRSWTAADMAAQITKRKWEAAHEAEQLRAYLDGTCVEWLRRYLENGKETLQRTDPPKTHMTHHPISDHEATLRCWALGFYPAEITLTWQRDGEDQTQDTELVETRPAGDGTFQKWAAVVVPSGEEQRYTCHVQHEGLPKPLTLRWEL

SEQ ID NO: 201 - protein, 276 aa, Artificial sequence; identical to SEQ ID NO: 49
  synthetic sequence

SEQ ID NO: 202 - protein, 276 aa, Artificial sequence
  synthetic sequence
GSHSMRYFSTSVSRPGRGEPRFIAVGYVDDTQFVRFDSDAASQRMEPRAPWIEQEGPEYWDEETGKVKAHSQTDRENLRIALRYYNQSEAGSHTLQMMFGCDVGSDGRFLRGYHQYAYDGKDYIALKEDLRSWTAADMAAQITQRKWEAARVAEQLRAYLEGTCVDGLRRYLENGKETLQRTDPPKTHMTHHPISDHEATLRCWALGFYPAEITLTWQRDGEDQTQDTELVETRPAGDGTFQKWAAVVVPSGEEQRYTCHVQHEGLPKPLTLRWEP

SEQ ID NO: 203 - protein, 276 aa, Artificial sequence; identical to SEQ ID NO: 50
  synthetic sequence

SEQ ID NO: 204 - protein, 276 aa, Artificial sequence
  synthetic sequence
GSHSMRYFSTSVSRPGRGEPRFIAVGYVDDTQFVRFDSDAASQRMEPRAPWIEQEGPEYWDEETGKVKAQSQTDRENLRIALRYYNQSEAGSHTLQMMFGCDVGSDGRFLRGYHQYAYDGKDYIALKEDLRSWTAADMAAQITKRKWEAAHVAEQQRAYLEGTCVDGLRRYLENGKETLQRTDPPKTHMTHHPISDHEATLRCWALGFYPAEITLTWQRDGEDQTQDTELVETRPAGDGTFQKWAAVVVPSGEEQRYTCHVQHEGLPKPLTLRWEP

SEQ ID NO: 205 - protein, 276 aa, Artificial sequence; identical to SEQ ID NO: 51
  synthetic sequence

SEQ ID NO: 206 - protein, 276 aa, Artificial sequence
  synthetic sequence
GSHSMRYFYTSVSRPGRGEPRFIAVGYVDDTQFVRFDSDAASQRMEPRAPWIEQEGPEYWDRNTRKVKAQSQTDRVDLGTLRGYYNQSEDGSHTIQRMYGCDVGPDGRFLRGYQQDAYDGKDYIALNEDLRSWTAADMAAQITQRKWETAHEAEQWRAYLEGTCVEWLRRYLENGKETLQRTDAPKTHMTHHAVSDHEATLRCWALSFYPAEITLTWQRDGEDQTQDTELVETRPAGDGTFQKWASVVVPSGQEQRYTCHVQHEGLPKPLTLRWEP

SEQ ID NO: 207 - protein, 276 aa, Artificial sequence [sequence omitted]

SEQ ID NO: 208 - protein, 276 aa, Artificial sequence
  synthetic sequence
GSHSMRYFDTAMSRPGRGEPRFISVGYVDDTQFVRFDSDAASPREEPRAPWIEQEGPEYWDRNTQIFKTNTQTDRESLRNLRGYYNQSEAGSHTLQSMYGCDVGPDGRLLRGHNQYAYDGKDYIALNEDLRSWTAADTAAQITQRKWEAARVAEQDRAYLEGTCVEWLRRYLENGKDTLERADPPKTHVTHHPISDHEATLRCWALGFYPAEITLTWQRDGEDQTQDTELVETRPAGDRTFQKWAAVVVPSGEEQRYTCHVQHEGLPKPLTLRWEP

SEQ ID NO: 209 - protein, 276 aa, Artificial sequence
  synthetic sequence
GSHSMRYFYTAMSRPGRGEPRFIAVGYVDDTQFVRFDSDAASPRMAPRAPWIEQEGPEYWDRNTQISKTNTQTYRESLRNLRGYYNQSEAGSHIIQRMYGCDVGPDGRLLRGYDQSAYDGKDYIALNEDLSSWTAADTAAQITQRKWEAAREAEQLRAYLEGLCVEWLRRYLENGKETLQRADPPKTHVTHHPISDHEATLRCWALGFYPAEITLTWQRDGEDQTQDTELVETRPAGDRTFQKWAAVVVPSGEEQRYTCHVQHEGLPKPLTLRWEP

SEQ ID NO: 210 - protein, 276 aa, Artificial sequence
  synthetic sequence
GSHSMRYFYTSVSRPGRGEPRFISVGYVDDTQFVRFDSDAASPREEPRAPWIEQEGPEYWDRNTQICKTNTQTYRENLRTALRYYNQSEAGSHTLQRMYGCDVGPDGRLLRGHNQFAYDGKDYIALNEDLSSWTAADTAAQITQRKWEAARVAEQLRTYLEGTCVEWLRRYLENGKETLQRADPPKTHVTHHPISDHEATLRCWALGFYPAEITLTWQRDGEDQTQDTELVETRPAGDRTFQKWAAVVVPSGEEQRYTCHVQHEGLPKPLTLRWEP

SEQ ID NO: 211 - protein, 276 aa, Artificial sequence
  synthetic sequence
GSHSMRYFHTAMSRPGRGEPRFITVGYVDDTLFVRFDSDATSPRKEPRAPWIEQEGPEYWDRETQISKTNTQTYRESLRNLRGYYNQSEAGSHTLQRMYGCDVGPDGRLLRGHNQYAYDGKDYIALNEDLRSWTAADTAAQISQRKLEAARVAEQLRAYLEGECVEWLRRYLENGKDKLERADPPKTHVTHHPISDHEATLRCWALGFYPAEITLTWQRDGEDQTQDTELVETRPAGDRTFQKWAAVVVPSGEEQRYTCHVQHEGLPKPLTLRWEP

SEQ ID NO: 212 - protein, 276 aa, Artificial sequence
  synthetic sequence
GSHSMRYFYTAMSRPGRGEPRFIAVGYVDDTQFVRFDSDAASPRMAPRAPWIEQEGPEYWDRETQKYKRQAQTDRVSLRNLRGYYNQSEAGSHTLQRMYGCDVGPDGRLLRGHDQSAYDGKDYIALNEDLSSWTAADTAAQITQRKWEAAREAEQWRAYLEGLCVEWLRRYLENGKETLQRADPPKTHVTHHPISDHEATLRCWALGFYPAEITLTWQRDGEDQTQDTELVETRPAGDRTFQKWAAVVVPSGEEQRYTCHVQHEGLPKPLTLRWEP

SEQ ID NO: 213 - protein, 276 aa, Artificial sequence
  synthetic sequence
GSHSMRYFYTAMSRPGRGEPRFIAVGYVDDTQFVRFDSDAASPRTEPRAPWIEQEGPEYWDRNTQIFKTNTQTYRENLRIALRYYNQSEAGSHIIQRMYGCDLGPDGRLLRGHDQSAYDGKDYIALNEDLSSWTAADTAAQITQRKWEAARVAEQLRAYLEGLCVEWLRRYLENGKETLQRADPPKTHVTHHPVSDHEATLRCWALGFYPAEITLTWQRDGEDQTQDTELVETRPAGDRTFQKWAAVVVPSGEEQRYTCHVQHEGLPKPLTLRWEP

SEQ ID NO: 214 - protein, 276 aa, Artificial sequence
  synthetic sequence
CSHSMKYFFTSVSRPGRGEPRFISVGYVDDTQFVRFDSDAASPRGEPRAPWVEQEGPEYWDRETQKYKRQAQTDRVSLRNLRGYYNQSEAGSHTLQWMCGCDLGPDGRLLRGYDQYAYDGKDYIALNEDLRSWTAADTAAQITQRKWEAAREAEQRRAYLEGTCVEWLRRYLENGKETLQRAEHPKTHVTHHPVSDHEATLRCWALGFYPAEITLTWQWDGEDQTQDTELVETRPAGDGTFQKWAAVMVPSGEEQRYTCHVQHEGLPEPLTLRWEP

SEQ ID NO: 215 - protein, 276 aa, Artificial sequence
  synthetic sequence
GSHSMRYFYTAVSRPGRGEPHFIAVGYVDDTQFVRFDSDAASPRGEPRAPWVEQEGPEYWDRETQKYKRQAQTDRVSLRNLRGYYNQSEARSHIIQRMYGCDVGPDGRLLRGYDQYAYDGKDYIALNEDLRSWTAADTAAQITQRKWEAAREAEQLRAYLEGLCVEWLRRYLKNGKETLQRAEHPKTHVTHHPVSDHEATLRCWALGFYPAEITLTWQWDGEDQTQDTELVETRPAGDGTFQKWAAVVVPSGEEQRYTCHVQHEGLPEPLTLRWEP

SEQ ID NO: 216 - protein, 276 aa, Artificial sequence
  synthetic sequence
GSHSMRYFYTAVSRPGRGEPHFIAVGYVDDTQFVRFDSDAASPRGEPRAPWVEQEGPEYWDRETQKYKRQAQTDRVSLRNLRGYYNQSEAGSHIIQRMYGCDVGPDGRLLRGYDQYAYDGKDYIALNEDLRSWTAADTAAQITQRKWEAAREAEQLRAYLEGLCVEWLRRYLKNGKETLQRAEHPKTHVTHHPVSDHEATLRCWALGFYPAEITLTWQWDGEDQTQDTELVETRPAGDGTFQKWAAVVVPSGEEQRYTCHVQHEGLPEPLTLRWEP

SEQ ID NO: 217 - protein, 276 aa, Artificial sequence
  synthetic sequence
GSHSMRYFSTSVSWPGRGEPRFIAVGYVDDTQFVRFDSDAASPRGEPREPWVEQEGPEYWDRETQKYKRQAQADRVNLRKLRGYYNQSEDGSHTLQRMFGCDLGPDGRLLRGYNQFAYDGKDYIALNEDLRSWTAADTAAQITQRKWEAAREAEQRRAYLEGTCVEWLRRYLENGKETLQRAEHPKTHVTHHPVSDHEATLRCWALGFYPAEITLTWQWDGEDQTQDTELVETRPAGDGTFQKWAAVVVPSGEEQRYTCHVQHEGLPEPLTLRWKP

SEQ ID NO: 218 - protein, 276 aa, Artificial sequence
  synthetic sequence
CSHSMRYFDTAVSRPGRGEPRFISVGYVDDTQFVRFDSDAASPRGEPRAPWVEQEGPEYWDRETQKYKRQAQADRVNLRKLRGYYNQSEDGSHTLQWMYGCDLGPDGRLLRGYDQSAYDGKDYIALNEDLRSWTAADTAAQITQRKWEAAREAEQWRAYLEGTCVEWLRRYLENGKETLQRAEHPKTHVTHHPVSDHEATLRCWALGFYPAEITLTWQRDGEDQTQDTELVETRPAGDGTFQKWAAVVVPSGEEQRYTCHVQHEGLPEPLTLRWEP

SEQ ID NO: 219 - protein, 276 aa, Artificial sequence
  synthetic sequence
CSHSMRYFDTAVSRPGRGEPRFISVGYVDDTQFVRFDSDAASPRGEPRAPWVEQEGPEYWDRETQNYKRQAQADRVSLRNLRGYYNQSEDGSHTLQRMYGCDLGPDGRLLRGYDQSAYDGKDYIALNEDLRSWTAADTAAQITQRKLEAARAAEQLRAYLEGTCVEWLRRYLENGKETLQRAEPPKTHVTHHPLSDHEATLRCWALGFYPAEITLTWQRDGEDQTQDTELVETRPAGDGTFQKWAAVVVPSGQEQRYTCHMQHEGLQEPLTLSWEP

SEQ ID NO: 220 - protein, 276 aa, Artificial sequence
  synthetic sequence
CSHSMRYFDTAVSRPGRGEPRFISVGYVDDTQFVRFDSDAASPRGEPRAPWVEQEGPEYWDRETQKYKRQAQADRVSLRNLRGYYNQSEDGSHTLQRMSGCDLGPDGRLLRGYDQSAYDGKDYIALNEDLRSWTAADTAAQITQRKLEAARAAEQLRAYLEGTCVEWLRRYLENGKETLQRAEPPKTHVTHHPLSDHEATLRCWALGFYPAEITLTWQRDGEDQTQDTELVETRPAGDGTFQKWAAVVVPSGQEQRYTCHMQHEGLQEPLTLSWEP

SEQ ID NO: 221 - protein, 276 aa, Artificial sequence
  synthetic sequence
CSHSMRYFYTAVSRPGRGEPRFIAVGYVDDTQFVQFDSDAASPRGEPRAPWVEQEGPEYWDRETQKYKRQAQTDRVSLRNLRGYYNQSEAGSHTLQRMYGCDLGPDGRLLRGYNQFAYDGKDYIALNEDLRSWTAADTAAQITQRKWEAARTAEQLRAYLEGTCVEWLRRYLENGKKTLQRAEHPKTHVTHHPVSDHEATLRCWALGFYPAEITLTWQRDGEDQTQDTELVETRPAGDGTFQKWAAVVVPSGEEQRYTCHVQHEGLPEPLTLRWGP

SEQ ID NO: 222 - protein, 276 aa, Artificial sequence
  synthetic sequence
CSHSMRYFYTAVSRPGRGEPHFIAVGYVDDTQFVRFDSDAASPRGEPRAPWVEQEGPEYWDRETQNYKRQAQTDRVNLRKLRGYYNQSEAGSHIIQRMYGCDLGPDGRLLRGHDQLAYDGKDYIALNEDLRSWTAADTAAQITQRKWEAAREAEQLRAYLEGTCVEWLRRYLENGKETLQRAEHPKTHVTHHPVSDHEATLRCWALGFYPAEITLTWQRDGEDQTQDTELVETRPAGDGTFQKWAAVVVPSGEEQRYTCHVQHEGLPEPLTLRWEP

SEQ ID NO: 223 - protein, 10 aa, Artificial sequence
  synthetic sequence
  misc_feature (1)..(10): Xaa can be any naturally occurring amino acid
XXXXXXXXXX

SEQ ID NO: 224 - protein, 10 aa, Artificial sequence
  synthetic sequence
  misc_feature (1)..(10): Xaa can be any naturally occurring amino acid
XXXXXXXXXX

SEQ ID NO: 225 - protein, 10 aa, Artificial sequence
  synthetic sequence
  misc_feature (1)..(10): Xaa can be any naturally occurring amino acid
XXXXXXXXXX

SEQ ID NO: 226 - protein, 10 aa, Artificial sequence
  synthetic sequence
  misc_feature (1)..(10): Xaa can be any naturally occurring amino acid
XXXXXXXXXX

SEQ ID NO: 227 - protein, 10 aa, Artificial sequence
  synthetic sequence
  misc_feature (1)..(10): Xaa can be any naturally occurring amino acid
XXXXXXXXXX

SEQ ID NO: 228 - protein, 10 aa, Artificial sequence
  synthetic sequence
  misc_feature (1)..(10): Xaa can be any naturally occurring amino acid
XXXXXXXXXX

SEQ ID NO: 229 - protein, 10 aa, Artificial sequence
  synthetic sequence
  misc_feature (1)..(10): Xaa can be any naturally occurring amino acid
XXXXXXXXXX

SEQ ID NO: 230 - protein, 10 aa, Artificial sequence
  synthetic sequence
  misc_feature (1)..(10): Xaa can be any naturally occurring amino acid
XXXXXXXXXX

SEQ ID NO: 231 - protein, 10 aa, Artificial sequence
  synthetic sequence
  misc_feature (1)..(10): Xaa can be any naturally occurring amino acid
XXXXXXXXXX

SEQ ID NO: 232 - protein, 10 aa, Artificial sequence
  synthetic sequence
  misc_feature (1)..(10): Xaa can be any naturally occurring amino acid
XXXXXXXXXX

SEQ ID NO: 233 - protein, 10 aa, Artificial sequence
  synthetic sequence
  misc_feature (1)..(10): Xaa can be any naturally occurring amino acid
XXXXXXXXXX

SEQ ID NO: 234 - protein, 10 aa, Artificial sequence
  synthetic sequence
  misc_feature (1)..(10): Xaa can be any naturally occurring amino acid
XXXXXXXXXX

SEQ ID NO: 235 - protein, 10 aa, Artificial sequence
  synthetic sequence
  misc_feature (1)..(10): Xaa can be any naturally occurring amino acid
XXXXXXXXXX

SEQ ID NO: 236 - protein, 10 aa, Artificial sequence
  synthetic sequence
  misc_feature (1)..(10): Xaa can be any naturally occurring amino acid
XXXXXXXXXX

SEQ ID NO: 237 - protein, 10 aa, Artificial sequence
  synthetic sequence
  misc_feature (1)..(10): Xaa can be any naturally occurring amino acid
XXXXXXXXXX

SEQ ID NO: 238 - protein, 10 aa, Artificial sequence
  synthetic sequence
  misc_feature (1)..(10): Xaa can be any naturally occurring amino acid
XXXXXXXXXX

SEQ ID NO: 239 - protein, 10 aa, Artificial sequence
  synthetic sequence
  misc_feature (1)..(10): Xaa can be any naturally occurring amino acid
XXXXXXXXXX

SEQ ID NO: 240 - protein, 10 aa, Artificial sequence
  synthetic sequence
  misc_feature (1)..(10): Xaa can be any naturally occurring amino acid
XXXXXXXXXX

SEQ ID NO: 241 - protein, 10 aa, Artificial sequence
  synthetic sequence
  misc_feature (1)..(10): Xaa can be any naturally occurring amino acid
XXXXXXXXXX

SEQ ID NO: 242 - protein, 10 aa, Artificial sequence
  synthetic sequence
  misc_feature (1)..(10): Xaa can be any naturally occurring amino acid
XXXXXXXXXX

SEQ ID NO: 243 - protein, 10 aa, Artificial sequence
  synthetic sequence
  misc_feature (1)..(10): Xaa can be any naturally occurring amino acid
XXXXXXXXXX

SEQ ID NO: 244 - protein, 10 aa, Artificial sequence
  synthetic sequence
  misc_feature (1)..(10): Xaa can be any naturally occurring amino acid
XXXXXXXXXX

SEQ ID NO: 245 - protein, 10 aa, Artificial sequence
  synthetic sequence
  misc_feature (1)..(10): Xaa can be any naturally occurring amino acid
XXXXXXXXXX

SEQ ID NO: 246 - protein, 10 aa, Artificial sequence
  synthetic sequence
  misc_feature (1)..(10): Xaa can be any naturally occurring amino acid
XXXXXXXXXX

SEQ ID NO: 247 - protein, 10 aa, Artificial sequence
  synthetic sequence
  misc_feature (1)..(10): Xaa can be any naturally occurring amino acid
XXXXXXXXXX

SEQ ID NO: 248 - protein, 10 aa, Artificial sequence
  synthetic sequence
  misc_feature (1)..(10): Xaa can be any naturally occurring amino acid
XXXXXXXXXX

SEQ ID NO: 249 - protein, 10 aa, Artificial sequence
  synthetic sequence
  misc_feature (1)..(10): Xaa can be any naturally occurring amino acid
XXXXXXXXXX

SEQ ID NO: 250 - protein, 10 aa, Artificial sequence
  synthetic sequence
  misc_feature (1)..(10): Xaa can be any naturally occurring amino acid
XXXXXXXXXX

SEQ ID NO: 251 - protein, 10 aa, Artificial sequence
  synthetic sequence
  misc_feature (1)..(10): Xaa can be any naturally occurring amino acid
XXXXXXXXXX

SEQ ID NO: 252 - protein, 10 aa, Artificial sequence
  synthetic sequence
  misc_feature (1)..(10): Xaa can be any naturally occurring amino acid
XXXXXXXXXX

SEQ ID NO: 253 - protein, 10 aa, Artificial sequence
  synthetic sequence
  misc_feature (1)..(10): Xaa can be any naturally occurring amino acid
XXXXXXXXXX

SEQ ID NO: 254 - protein, 10 aa, Artificial sequence
  synthetic sequence
  misc_feature (1)..(10): Xaa can be any naturally occurring amino acid
XXXXXXXXXX

SEQ ID NO: 255 - protein, 10 aa, Artificial sequence
  synthetic sequence
  misc_feature (1)..(10): Xaa can be any naturally occurring amino acid
XXXXXXXXXX

SEQ ID NO: 256 - protein, 10 aa, Artificial sequence
  synthetic sequence
  misc_feature (1)..(10): Xaa can be any naturally occurring amino acid
XXXXXXXXXX

SEQ ID NO: 257 - protein, 10 aa, Artificial sequence
  synthetic sequence
  misc_feature (1)..(10): Xaa can be any naturally occurring amino acid
XXXXXXXXXX

SEQ ID NO: 258 - protein, 10 aa, Artificial sequence
  synthetic sequence
  misc_feature (1)..(10): Xaa can be any naturally occurring amino acid
XXXXXXXXXX

SEQ ID NO: 259 - protein, 10 aa, Artificial sequence
  synthetic sequence
  misc_feature (1)..(10): Xaa can be any naturally occurring amino acid
XXXXXXXXXX

SEQ ID NO: 260 - protein, 10 aa, Artificial sequence
  synthetic sequence
  misc_feature (1)..(10): Xaa can be any naturally occurring amino acid
XXXXXXXXXX

SEQ ID NO: 261 - protein, 10 aa, Artificial sequence
  synthetic sequence
  misc_feature (1)..(10): Xaa can be any naturally occurring amino acid
XXXXXXXXXX

SEQ ID NO: 262 - protein, 10 aa, Artificial sequence
  synthetic sequence
  misc_feature (1)..(10): Xaa can be any naturally occurring amino acid
XXXXXXXXXX

SEQ ID NO: 263 - protein, 10 aa, Artificial sequence
  synthetic sequence
  misc_feature (1)..(10): Xaa can be any naturally occurring amino acid
XXXXXXXXXX

SEQ ID NO: 264 - protein, 10 aa, Artificial sequence
  synthetic sequence
  misc_feature (1)..(10): Xaa can be any naturally occurring amino acid
XXXXXXXXXX

SEQ ID NO: 265 - protein, 10 aa, Artificial sequence
  synthetic sequence
  misc_feature (1)..(10): Xaa can be any naturally occurring amino acid
XXXXXXXXXX

SEQ ID NO: 266 - protein, 10 aa, Artificial sequence
  synthetic sequence
  misc_feature (1)..(10): Xaa can be any naturally occurring amino acid
XXXXXXXXXX

SEQ ID NO: 267 - protein, 10 aa, Artificial sequence
  synthetic sequence
  misc_feature (1)..(10): Xaa can be any naturally occurring amino acid
XXXXXXXXXX

SEQ ID NO: 268 - protein, 10 aa, Artificial sequence
  synthetic sequence
  misc_feature (1)..(10): Xaa can be any naturally occurring amino acid
XXXXXXXXXX

SEQ ID NO: 269 - protein, 10 aa, Artificial sequence
  synthetic sequence
  misc_feature (1)..(10): Xaa can be any naturally occurring amino acid
XXXXXXXXXX

SEQ ID NO: 270 - protein, 10 aa, Artificial sequence
  synthetic sequence
  misc_feature (1)..(10): Xaa can be any naturally occurring amino acid
XXXXXXXXXX

SEQ ID NO: 271 - protein, 9 aa, Artificial sequence
  synthetic sequence
YPYDVPDYA

SEQ ID NO: 272 - protein, 8 aa, Artificial sequence
  synthetic sequence
DYKDDDDK

SEQ ID NO: 273 - protein, 10 aa, Artificial sequence
  synthetic sequence
EQKLISEEDL

SEQ ID NO: 274 - protein, 5 aa, Artificial sequence
  synthetic sequence
HHHHH

SEQ ID NO: 275 - protein, 6 aa, Artificial sequence
  synthetic sequence
HHHHHH

SEQ ID NO: 276 - protein, 10 aa, Artificial sequence
  synthetic sequence
EQKLISEEDL

SEQ ID NO: 277 - protein, 8 aa, Artificial sequence
  synthetic sequence
DYKDDDDK

SEQ ID NO: 278 - protein, 8 aa, Artificial sequence
  synthetic sequence
WSHPQFEK

SEQ ID NO: 279 - protein, 9 aa, Artificial sequence
  synthetic sequence
YPYDVPDYA

SEQ ID NO: 280 - protein, 5 aa, Artificial sequence
  synthetic sequence
RYIRS

SEQ ID NO: 281 - protein, 4 aa, Artificial sequence
  synthetic sequence
FHHT

SEQ ID NO: 282 - protein, 17 aa, Artificial sequence
  synthetic sequence
WEAAAREACCRECCARA

SEQ ID NO: 283 - protein, 5 aa, Artificial sequence
  synthetic sequence
AAAGG

SEQ ID NO: 284 - protein, 5 aa, Artificial sequence
  synthetic sequence
  MISC_FEATURE (1)..(4): The residues at positions 1 to 4 may be repeated 1 to 10 times
GGGGS

SEQ ID NO: 285 - protein, 8 aa, Artificial sequence
  synthetic sequence
  misc_feature (1)..(8): Xaa can be any naturally occurring amino acid
XXXXXXXX

SEQ ID NO: 286 - protein, 7 aa, Artificial sequence
  synthetic sequence
  misc_feature (1)..(7): Xaa can be any naturally occurring amino acid
XXXXXXX

SEQ ID NO: 287 - protein, 5 aa, Artificial sequence
  synthetic sequence
GTLRG

SEQ ID NO: 288 - protein, 5 aa, Artificial sequence
  synthetic sequence
YNQSE

SEQ ID NO: 289 - protein, 5 aa, Artificial sequence
  synthetic sequence
TAADM

SEQ ID NO: 290 - protein, 5 aa, Artificial sequence
  synthetic sequence
AQTTK

SEQ ID NO: 291 - protein, 5 aa, Artificial sequence
  synthetic sequence
VETRP

SEQ ID NO: 292 - protein, 5 aa, Artificial sequence
  synthetic sequence
GDGTF

SEQ ID NO: 293 - protein, 5 aa, Artificial sequence
  synthetic sequence
RNLRG

SEQ ID NO: 294 - protein, 5 aa, Artificial sequence
  synthetic sequence
TAADT

SEQ ID NO: 295 - protein, 5 aa, Artificial sequence
  synthetic sequence
AQITQ

SEQ ID NO: 296 - protein, 5 aa, Artificial sequence
  synthetic sequence
GDRTF

SEQ ID NO: 297 - protein, 276 aa, Homo sapiens [sequence omitted]

SEQ ID NO: 298 - protein, 276 aa, Artificial sequence; identical to SEQ ID NO: 48
  synthetic sequence

SEQ ID NO: 299 - protein, 276 aa, Artificial sequence
  synthetic sequence
GSHSMRYFFTSVSRPGRGEPRFIAVGYVDDTQFVRFDSDAASQRMEPRAPWIEQEGPEYWDGETRKVKAHSQTHRVDLGTLRGCYNQSEAGSHTVQRMYGCDVGSDWRFLRGYHQYAYDGKDYIALKEDLRSWTAADMCAQTTKHKWEAAHVAEQLRAYLEGTCVEWLRRYLENGKETLQRTDAPKTHMTHHAVSDHEATLRCWALSFYPAEITLTWQRDGEDQTQDTELVETRPAGDGTFQKWAAVVVPSGQEQRYTCHVQHEGLPKPLTLRWEP

SEQ ID NO: 300 - protein, 275 aa, Homo sapiens
GSHSMRYFYTSVSRPGRGEPRFIAVGYVDDTQFVRFDSDAASQRMEPRAPWIEQEGPEYWDQETRNVKAQSQTDRVDLGTLRGYYNQSEDGSHTIQIMYGCDVGPDGRFLRGYRQDAYDGKDYIALNEDLRSWTAADMAAQITKRKWEAAHAAEQQRAYLEGTCVEWLRRYLENGKETLQRTDPPKTHMTHHPISDHEATLRCWALGFYPAEITLTWQRDGEDQTQDTELVETRPAGDGTFQKWAAVVVPSGEEQRYTCHVQHEGLPKPLTLRWE

SEQ ID NO: 301 - protein, 275 aa, Artificial sequence
  synthetic sequence
GSHSMRYFYTSVSRPGRGEPRFIAVGYVDDTQFVRFDSDAASQRMEPRAPWIEQEGPEYWDQETRNVKAQSQTDRVDLGTLRGAYNQSEDGSHTIQIMYGCDVGPDGRFLRGYRQDAYDGKDYIALNEDLRSWTAADMAAQITKRKWEAAHAAEQQRAYLEGTCVEWLRRYLENGKETLQRTDPPKTHMTHHPISDHEATLRCWALGFYPAEITLTWQRDGEDQTQDTELVETRPCGDGTFQKWAAVVVPSGEEQRYTCHVQHEGLPKPLTLRWE

SEQ ID NO: 302 - protein, 341 aa, Homo sapiens
GSHSMRYFSTSVSRPGRGEPRFIAVGYVDDTQFVRFDSDAASQRMEPRAPWIEQEGPEYWDEETGKVKAHSQTDRENLRIALRYYNQSEAGSHTLQMMFGCDVGSDGRFLRGYHQYAYDGKDYIALKEDLRSWTAADMAAQITKRKWEAAHVAEQQRAYLEGTCVDGLRRYLENGKETLQRTDPPKTHMTHHPISDHEATLRCWALGFYPAEITLTWQRDGEDQTQDTELVETRPAGDGTFQKWAAVVVPSGEEQRYTCHVQHEGLPKPLTLRWEPSSQPTVPIVGIIAGLVLLGAVITGAVVAAVMWRRNSSDRKGGSYSQAASSDSAQGSDVSLTACKV

SEQ ID NO: 303 - protein, 341 aa, Homo sapiens
GSHSMRYFTTSVSRPGRGEPRFIAVGYVDDTQFVRFDSDAASQRMEPRAPWIEQEGPEYWDRNTRNVKAHSQIDRVDLGTLRGYYNQSEAGSHTIQMMYGCDVGSDGRFLRGYQQDAYDGKDYIALNEDLRSWTAADMAAQITQRKWEAARVAEQLRAYLEGTCVEWLRRYLENGKETLQRTDPPKTHMTHHAVSDHEATLRCWALSFYPAEITLTWQRDGEDQTQDTELVETRPAGDGTFQKWASVVVPSGQEQRYTCHVQHEGLPKPLTLRWEPSSQPTIPIVGIIAGLVLFGAVFAGAVVAAVRWRRKSSDRKGGSYSQAASSDSAQGSDMSLTACKV

SEQ ID NO: 304 - protein, 276 aa, Homo sapiens [sequence omitted]

SEQ ID NO: 305 - protein, 276 aa, Artificial sequence
  synthetic sequence
GSHSMRYFYTSVSRPGRGEPRFISVGYVDDTQFVRFDSDAASPREEPRAPWIEQEGPEYWDRNTQIYKAQAQTDRESLRNLRGAYNQSEAGSHTLQSMYGCDVGPDGRLLRGHDQYAYDGKDYIALNEDLRSWTAADTAAQITQRKWEAAREAEQRRAYLEGECVEWLRRYLENGKDKLERADPPKTHVTHHPISDHEATLRCWALGFYPAEITLTWQRDGEDQTQDTELVETRPCGDRTFQKWAAVVVPSGEEQRYTCHVQHEGLPKPLTLRWEP

SEQ ID NO: 306 - protein, 276 aa, Artificial sequence
  synthetic sequence
GSHSMRYFYTSVSRPGRGEPRFISVGYVDDTQFVRFDSDAASPREEPRAPWIEQEGPEYWDRNTQIYKAQAQTDRESLRNLRGCYNQSEAGSHTLQSMYGCDVGPDGRLLRGHDQYAYDGKDYIALNEDLRSWTAADTCAQITQRKWEAAREAEQRRAYLEGECVEWLRRYLENGKDKLERADPPKTHVTHHPISDHEATLRCWALGFYPAEITLTWQRDGEDQTQDTELVETRPAGDRTFQKWAAVVVPSGEEQRYTCHVQHEGLPKPLTLRWEP

SEQ ID NO: 307 - protein, 276 aa, Homo sapiens; identical to SEQ ID NO: 219

SEQ ID NO: 308 - protein, 276 aa, Homo sapiens
CSHSMRYFDTAVSRPGRGEPRFISVGYVDDTQFVRFDSDAASPRGEPRAPWVEQEGPEYWDRETQNYKRQAQADRVSLRNLRGAYNQSEDGSHTLQRMYGCDLGPDGRLLRGYDQSAYDGKDYIALNEDLRSWTAADTAAQITQRKLEAARAAEQLRAYLEGTCVEWLRRYLENGKETLQRAEPPKTHVTHHPLSDHEATLRCWALGFYPAEITLTWQRDGEDQTQDTELVETRPCGDGTFQKWAAVVVPSGQEQRYTCHMQHEGLQEPLTLSWEP

SEQ ID NO: 309 - protein, 246 aa, Artificial sequence
  synthetic sequence
  MISC_FEATURE (78)..(79): Amino acid cluster 1 is present between the residues at positions 78 and 79.
  MISC_FEATURE (79)..(79): The cysteine residue forms a disulfide bond between the alpha1 and alpha2-1 helices.
  MISC_FEATURE (79)..(80): Amino acid cluster 2 is present between the residues at positions 79 and 80.
  MISC_FEATURE (123)..(124): Amino acid cluster 3 is present between the residues at positions 123 and 124.
  MISC_FEATURE (124)..(124): The cysteine residue at position 124 forms a disulfide bond between the alpha1 and alpha2-1 helices
  MISC_FEATURE (124)..(125): Amino acid cluster 4 is present between the residues at positions 124 and 125.
  MISC_FEATURE (210)..(211): Amino acid cluster 5 is present between the residues at positions 210 and 211.
  MISC_FEATURE (211)..(211): The cysteine residue forms a disulfide bond with the beta2M polypeptide cysteine at position 12.
  MISC_FEATURE (211)..(212): Amino acid cluster 6 is present between the residues at positions 211 and 212.
  MISC_FEATURE (212)..(213): Amino acid cluster 6 is present between the residues at positions 211 and 212.
GSHSMRYFFTSVSRPGRGEPRFIAVGYVDDTQFVRFDSDAASQRMEPRAPWIEQEGPEYWDGETRKVKAHSQTHRVDLCAGSHTVQRMYGCDVGSDWRFLRGYHQYAYDGKDYIALKEDLRSWCHKWEAAHVAEQLRAYLEGTCVEWLRRYLENGKETLQRTDAPKTHMTHHAVSDHEATLRCWALSFYPAEITLTWQRDGEDQTQDTELCQKWAAVVVPSGQEQRYTCHVQHEGLPKPLTLRWEP

SEQ ID NO: 310 - protein, 99 aa, Artificial sequence [sequence omitted]

SEQ ID NO: 311 - protein, 99 aa, Artificial sequence
  synthetic sequence
IQRTPKIQVYSCHPAENGKSNFLNCYVSGFHPSDIEVDLLKNGERIEKVEHSDLSFSKDWSFYLLYYTEFTPTEKDEYACRVNHVTLSQPKIVKWDRDM

SEQ ID NO: 312 - protein, 276 aa, Artificial sequence
  synthetic sequence
GSHSMRYFFTSVSRPGRGEPRFIAVGYVDDTQFVRFDSDAASQRMEPRAPWIEQEGPEYWDGETRKVKAHSQTHRVDLGTLRGYYNQSEAGSHTVQRMYGCDVGSDWRFLRGYHQYAYDGKDYIALKEDLRSWTAADMAAQTTKHKWEAAHVAEQLRAYLEGTCVEWLRRYLENGKETLQRTDAPKTHMTHHAVSDHEATLRCWALSFYPAEITLTWQRDGEDQTQDTELVETRPCGDGTFQKWAAVVVPSGQEQRYTCHVQHEGLPKPLTLRWEP

SEQ ID NO: 313 - protein, 275 aa, Artificial sequence; identical to SEQ ID NO: 46
  synthetic sequence

SEQ ID NO: 314 - protein, 99 aa, Artificial sequence; identical to SEQ ID NO: 311
  synthetic sequence

SEQ ID NO: 315 - protein, 10 aa, Artificial sequence
  synthetic sequence
  MISC_FEATURE (6)..(10): The amino acids from positions 6 to 10 may be repeated 1, 2, 3, 4, 5, 6, 7, 8, or 9 times
GCGGSGGGGS

SEQ ID NO: 316 - protein, 20 aa, Artificial sequence
  synthetic sequence
GCGGSGGGGSGGGGSGGGGS

SEQ ID NO: 317 - protein, 15 aa, Artificial sequence
  synthetic sequence
GCGGSGGGGSGGGGS

SEQ ID NO: 318 - protein, 5 aa, Artificial sequence
  synthetic sequence
GCGGS

SEQ ID NO: 319 - protein, 10 aa, Artificial sequence
  synthetic sequence
  MISC_FEATURE (6)..(10): The amino acids at positions 6 to 10 may be repeated 1 to 10 times
GCGGSGGGGS

SEQ ID NO: 320 - protein, 15 aa, Artificial sequence
  synthetic sequence
GCGGSGGGGSGGGGS

SEQ ID NO: 321 - protein, 20 aa, Artificial sequence
  synthetic sequence
GCGGSGGGGSGGGGSGGGGS

SEQ ID NO: 322 - protein, 25 aa, Artificial sequence
  synthetic sequence
GCGGSGGGGSGGGGSGGGGSGGGGS

SEQ ID NO: 323 - protein, 30 aa, Artificial sequence
  synthetic sequence
GCGGSGGGGSGGGGSGGGGSGGGGSGGGGS

SEQ ID NO: 324 - protein, 35 aa, Artificial sequence
  synthetic sequence
GCGGSGGGGSGGGGSGGGGSGGGGSGGGGSGGGGS

SEQ ID NO: 325 - protein, 40 aa, Artificial sequence
  synthetic sequence
GCGGSGGGGSGGGGSGGGGSGGGGSGGGGSGGGGSGGGGS

SEQ ID NO: 326 - protein, 45 aa, Artificial sequence
  synthetic sequence
GCGGSGGGGSGGGGSGGGGSGGGGSGGGGSGGGGSGGGGSGGGGS

SEQ ID NO: 327 - protein, 50 aa, Artificial sequence
  synthetic sequence
GCGGSGGGGSGGGGSGGGGSGGGGSGGGGSGGGGSGGGGSGGGGSGGGGS

SEQ ID NO: 328 - protein, 55 aa, Artificial sequence
  synthetic sequence
GCGGSGGGGSGGGGSGGGGSGGGGSGGGGSGGGGSGGGGSGGGGSGGGGSGGGGS

SEQ ID NO: 329 - protein, 5 aa, Artificial sequence
  synthetic sequence
CGGGS

SEQ ID NO: 330 - protein, 10 aa, Artificial sequence
  synthetic sequence
  MISC_FEATURE (6)..(10): The amino acids at positions 6 to 10 can be repeated 1 to 10 times
CGGGSGGGGS

SEQ ID NO: 331 - protein, 10 aa, Artificial sequence
  synthetic sequence
CGGGSGGGGS

SEQ ID NO: 332 - protein, 15 aa, Artificial sequence
  synthetic sequence
CGGGSGGGGSGGGGS

SEQ ID NO: 333 - protein, 20 aa, Artificial sequence
  synthetic sequence
CGGGSGGGGSGGGGSGGGGS

SEQ ID NO: 334 - protein, 25 aa, Artificial sequence
  synthetic sequence
CGGGSGGGGSGGGGSGGGGSGGGGS

SEQ ID NO: 335 - protein, 30 aa, Artificial sequence
  synthetic sequence
CGGGSGGGGSGGGGSGGGGSGGGGSGGGGS

SEQ ID NO: 336 - protein, 35 aa, Artificial sequence
  synthetic sequence
CGGGSGGGGSGGGGSGGGGSGGGGSGGGGSGGGGS

SEQ ID NO: 337 - protein, 40 aa, Artificial sequence
  synthetic sequence
CGGGSGGGGSGGGGSGGGGSGGGGSGGGGSGGGGSGGGGS

SEQ ID NO: 338 - protein, 45 aa, Artificial sequence
  synthetic sequence
CGGGSGGGGSGGGGSGGGGSGGGGSGGGGSGGGGSGGGGSGGGGS

SEQ ID NO: 339 - protein, 50 aa, Artificial sequence
  synthetic sequence
CGGGSGGGGSGGGGSGGGGSGGGGSGGGGSGGGGSGGGGSGGGGSGGGGS

SEQ ID NO: 340 - protein, 55 aa, Artificial sequence
  synthetic sequence
CGGGSGGGGSGGGGSGGGGSGGGGSGGGGSGGGGSGGGGSGGGGSGGGGSGGGGS

SEQ ID NO: 341 - protein, 276 aa, Artificial sequence
  synthetic sequence
GSHSMRYFFTSVSRPGRGEPRFIAVGYVDDTQFVRFDSDAASQRMEPRAPWIEQEGPEYWDGETRKVKAHSQTHRVDLGTLRGCYNQSEAGSHTVQRMYGCDVGSDWRFLRGYHQYAYDGKDYIALKEDLRSWTAADMAAQTTKHKWEAAHVAEQLRAYLEGTCVEWLRRYLENGKETLQRTDAPKTHMTHHAVSDHEATLRCWALSFYPAEITLTWQRDGEDQTQDTELVETRPCGDGTFQKWAAVVVPSGQEQRYTCHVQHEGLPKPLTLRWEP

SEQ ID NO: 342 - protein, 10 aa, Artificial sequence
  synthetic sequence
  MISC_FEATURE (6)..(10): The residues from positions 6 to 10 may be repeated 1 to 10 times
GCGGSGGGGS

SEQ ID NO: 343 - protein, 275 aa, Artificial sequence
  synthetic sequence
GSHSMRYFFTSVSRPGRGEPRFIAVGYVDDTQFVRFDSDAASQKMEPRAPWIEQEGPEYWDQETRNMKAHSQTDRANLGTLRGCYNQSEDGSHTIQIMYGCDVGPDGRFLRGYRQDAYDGKDYIALNEDLRSWTAADMAAQITKRKWEAVHAAEQRRVYLEGRCVDGLRRYLENGKETLQRTDPPKTHMTHHPISDHEATLRCWALGFYPAEITLTWQRDGEDQTQDTELVETRPCGDGTFQKWAAVVVPSGEEQRYTCHVQHEGLPKPLTLRWE

SEQ ID NO: 344 - protein, 275 aa, Artificial sequence
  synthetic sequence
GSHSMRYFYTSVSRPGRGEPRFIAVGYVDDTQFVRFDSDAASQRMEPRAPWIEQEGPEYWDQETRNVKAQSQTDRVDLGTLRGCYNQSEDGSHTIQIMYGCDVGPDGRFLRGYRQDAYDGKDYIALNEDLRSWTAADMAAQITKRKWEAAHAAEQQRAYLEGRCVEWLRRYLENGKETLQRTDPPKTHMTHHPISDHEATLRCWALGFYPAEITLTWQRDGEDQTQDTELVETRPCGDGTFQKWAAVVVPSGEEQRYTCHVQHEGLPKPLTLRWE

SEQ ID NO: 345 - protein, 275 aa, Artificial sequence
  synthetic sequence
GSHSMRYFSTSVSRPGRGEPRFIAVGYVDDTQFVRFDSDAASQRMEPRAPWIEQEGPEYWDEETGKVKAHSQTDRENLRIALRCYNQSEAGSHTLQMMFGCDVGSDGRFLRGYHQYAYDGKDYIALKEDLRSWTAADMAAQITQRKWEAARVAEQLRAYLEGTCVDGLRRYLENGKETLQRTDPPKTHMTHHPISDHEATLRCWALGFYPAEITLTWQRDGEDQTQDTELVETRPCGDGTFQKWAAVVVPSGEEQRYTCHVQHEGLPKPLTLRWE

SEQ ID NO: 346 - protein, 275 aa, Artificial sequence
  synthetic sequence
GSHSMRYFSTSVSRPGRGEPRFIAVGYVDDTQFVRFDSDAASQRMEPRAPWIEQEGPEYWDEETGKVKAHSQTDRENLRIALRCYNQSEAGSHTLQMMFGCDVGSDGRFLRGYHQYAYDGKDYIALKEDLRSWTAADMAAQITKRKWEAAHVAEQQRAYLEGTCVDGLRRYLENGKETLQRTDPPKTHMTHHPISDHEATLRCWALGFYPAEITLTWQRDGEDQTQDTELVETRPCGDGTFQKWAAVVVPSGEEQRYTCHVQHEGLPKPLTLRWE

SEQ ID NO: 347 - protein, 275 aa, Artificial sequence
  synthetic sequence
GSHSMRYFSTSVSRPGRGEPRFIAVGYVDDTQFVRFDSDAASQRMEPRAPWIEQEGPEYWDEETGKVKAQSQTDRENLRIALRCYNQSEAGSHTLQMMFGCDVGSDGRFLRGYHQYAYDGKDYIALKEDLRSWTAADMAAQITKRKWEAAHVAEQQRAYLEGTCVDGLRRYLENGKETLQRTDPPKTHMTHHPISDHEATLRCWALGFYPAEITLTWQRDGEDQTQDTELVETRPCGDGTFQKWAAVVVPSGEEQRYTCHVQHEGLPKPLTLRWE

SEQ ID NO: 348 - protein, 275 aa, Artificial sequence
  synthetic sequence
GSHSMRYFTTSVSRPGRGEPRFIAVGYVDDTQFVRFDSDAASQRMEPRAPWIEQEGPEYWDRNTRNVKAHSQIDRVDLGTLRGCYNQSEAGSHTIQMMYGCDVGSDGRFLRGYQQDAYDGKDYIALNEDLRSWTAADMAAQITQRKWEAARVAEQLRAYLEGTCVEWLRRYLENGKETLQRTDPPKTHMTHHAVSDHEATLRCWALSFYPAEITLTWQRDGEDQTQDTELVETRPCGDGTFQKWASVVVPSGQEQRYTCHVQHEGLPKPLTLRWE

SEQ ID NO: 349 - protein, 275 aa, Artificial sequence
  synthetic sequence
GSHSMRYFYTSVSRPGRGEPRFIAVGYVDDTQFVRFDSDAASQRMEPRAPWIEQEGPEYWDRNTRKVKAQSQTDRVDLGTLRGCYNQSEDGSHTIQRMYGCDVGPDGRFLRGYQQDAYDGKDYIALNEDLRSWTAADMAAQITQRKWETAHEAEQWRAYLEGTCVEWLRRYLENGKETLQRTDAPKTHMTHHAVSDHEATLRCWALSFYPAEITLTWQRDGEDQTQDTELVETRPCGDGTFQKWASVVVPSGQEQRYTCHVQHEGLPKPLTLRWE

SEQ ID NO: 350 - protein, 276 aa, Artificial sequence
  synthetic sequence
GSHSMRYFYTSVSRPGRGEPRFISVGYVDDTQFVRFDSDAASPREEPRAPWIEQEGPEYWDRNTQIYKAQAQTDRESLRNLRGCYNQSEAGSHTLQSMYGCDVGPDGRLLRGHDQYAYDGKDYIALNEDLRSWTAADTAAQITQRKWEAAREAEQRRAYLEGECVEWLRRYLENGKDKLERADPPKTHVTHHPISDHEATLRCWALGFYPAEITLTWQRDGEDQTQDTELVETRPCGDRTFQKWAAVVVPSGEEQRYTCHVQHEGLPKPLTLRWEP

SEQ ID NO: 351 - protein, 275 aa, Artificial sequence
  synthetic sequence
GSHSMRYFDTAMSRPGRGEPRFISVGYVDDTQFVRFDSDAASPREEPRAPWIEQEGPEYWDRNTQIFKTNTQTDRESLRNLRGCYNQSEAGSHTLQSMYGCDVGPDGRLLRGHNQYAYDGKDYIALNEDLRSWTAADTAAQITQRKWEAARVAEQDRAYLEGTCVEWLRRYLENGKDTLERADPPKTHVTHHPISDHEATLRCWALGFYPAEITLTWQRDGEDQTQDTELVETRPCGDRTFQKWAAVVVPSGEEQRYTCHVQHEGLPKPLTLRWE

SEQ ID NO: 352 - protein, 275 aa, Artificial sequence
  synthetic sequence
GSHSMRYFYTAMSRPGRGEPRFIAVGYVDDTQFVRFDSDAASPRMAPRAPWIEQEGPEYWDRNTQISKTNTQTYRESLRNLRGCYNQSEAGSHIIQRMYGCDVGPDGRLLRGYDQSAYDGKDYIALNEDLSSWTAADTAAQITQRKWEAAREAEQLRAYLEGLCVEWLRRYLENGKETLQRADPPKTHVTHHPISDHEATLRCWALGFYPAEITLTWQRDGEDQTQDTELVETRPCGDRTFQKWAAVVVPSGEEQRYTCHVQHEGLPKPLTLRWE

SEQ ID NO: 353 - protein, 275 aa, Artificial sequence
  synthetic sequence
GSHSMRYFYTSVSRPGRGEPRFISVGYVDDTQFVRFDSDAASPREEPRAPWIEQEGPEYWDRNTQICKTNTQTYRENLRTALRCYNQSEAGSHTLQRMYGCDVGPDGRLLRGHNQFAYDGKDYIALNEDLSSWTAADTAAQITQRKWEAARVAEQLRTYLEGTCVEWLRRYLENGKETLQRADPPKTHVTHHPISDHEATLRCWALGFYPAEITLTWQRDGEDQTQDTELVETRPCGDRTFQKWAAVVVPSGEEQRYTCHVQHEGLPKPLTLRWE

SEQ ID NO: 354 - protein, 275 aa, Artificial sequence
  synthetic sequence
GSHSMRYFHTAMSRPGRGEPRFITVGYVDDTLFVRFDSDATSPRKEPRAPWIEQEGPEYWDRETQISKTNTQTYRESLRNLRGCYNQSEAGSHTLQRMYGCDVGPDGRLLRGHNQYAYDGKDYIALNEDLRSWTAADTAAQISQRKLEAARVAEQLRAYLEGECVEWLRRYLENGKDKLERADPPKTHVTHHPISDHEATLRCWALGFYPAEITLTWQRDGEDQTQDTELVETRPCGDRTFQKWAAVVVPSGEEQRYTCHVQHEGLPKPLTLRWE

SEQ ID NO: 355 - protein, 275 aa, Artificial sequence
  synthetic sequence
GSHSMRYFYTAMSRPGRGEPRFIAVGYVDDTQFVRFDSDAASPRMAPRAPWIEQEGPEYWDRETQKYKRQAQTDRVSLRNLRGCYNQSEAGSHTLQRMYGCDVGPDGRLLRGHDQSAYDGKDYIALNEDLSSWTAADTAAQITQRKWEAAREAEQWRAYLEGLCVEWLRRYLENGKETLQRADPPKTHVTHHPISDHEATLRCWALGFYPAEITLTWQRDGEDQTQDTELVETRPCGDRTFQKWAAVVVPSGEEQRYTCHVQHEGLPKPLTLRWE

SEQ ID NO: 356 - protein, 275 aa, Artificial sequence
  synthetic sequence
GSHSMRYFYTAMSRPGRGEPRFIAVGYVDDTQFVRFDSDAASPRTEPRAPWIEQEGPEYWDRNTQIFKTNTQTYRENLRIALRCYNQSEAGSHIIQRMYGCDLGPDGRLLRGHDQSAYDGKDYIALNEDLSSWTAADTAAQITQRKWEAARVAEQLRAYLEGLCVEWLRRYLENGKETLQRADPPKTHVTHHPVSDHEATLRCWALGFYPAEITLTWQRDGEDQTQDTELVETRPCGDRTFQKWAAVVVPSGEEQRYTCHVQHEGLPKPLTLRWE

SEQ ID NO: 357 - protein, 276 aa, Artificial sequence
  synthetic sequence
CSHSMRYFDTAVSRPGRGEPRFISVGYVDDTQFVRFDSDAASPRGEPRAPWVEQEGPEYWDRETQNYKRQAQADRVSLRNLRGCYNQSEDGSHTLQRMYGCDLGPDGRLLRGYDQSAYDGKDYIALNEDLRSWTAADTAAQITQRKLEAARAAEQLRAYLEGTCVEWLRRYLENGKETLQRAEPPKTHVTHHPLSDHEATLRCWALGFYPAEITLTWQRDGEDQTQDTELVETRPCGDGTFQKWAAVVVPSGQEQRYTCHMQHEGLQEPLTLSWEP

SEQ ID NO: 358 - protein, 276 aa, Artificial sequence
  synthetic sequence
CSHSMKYFFTSVSRPGRGEPRFISVGYVDDTQFVRFDSDAASPRGEPRAPWVEQEGPEYWDRETQKYKRQAQTDRVSLRNLRGCYNQSEAGSHTLQWMCGCDLGPDGRLLRGYDQYAYDGKDYIALNEDLRSWTAADTAAQITQRKWEAAREAEQRRAYLEGTCVEWLRRYLENGKETLQRAEHPKTHVTHHPVSDHEATLRCWALGFYPAEITLTWQWDGEDQTQDTELVETRPCGDGTFQKWAAVMVPSGEEQRYTCHVQHEGLPEPLTLRWEP

SEQ ID NO: 359 - protein, 276 aa, Artificial sequence
  synthetic sequence
GSHSMRYFYTAVSRPGRGEPHFIAVGYVDDTQFVRFDSDAASPRGEPRAPWVEQEGPEYWDRETQKYKRQAQTDRVSLRNLRGCYNQSEARSHIIQRMYGCDVGPDGRLLRGYDQYAYDGKDYIALNEDLRSWTAADTAAQITQRKWEAAREAEQLRAYLEGLCVEWLRRYLKNGKETLQRAEHPKTHVTHHPVSDHEATLRCWALGFYPAEITLTWQWDGEDQTQDTELVETRPCGDGTFQKWAAVVVPSGEEQRYTCHVQHEGLPEPLTLRWEP

SEQ ID NO: 360 - protein, 276 aa, Artificial sequence
  synthetic sequence
GSHSMRYFYTAVSRPGRGEPHFIAVGYVDDTQFVRFDSDAASPRGEPRAPWVEQEGPEYWDRETQKYKRQAQTDRVSLRNLRGCYNQSEAGSHIIQRMYGCDVGPDGRLLRGYDQYAYDGKDYIALNEDLRSWTAADTAAQITQRKWEAAREAEQLRAYLEGLCVEWLRRYLKNGKETLQRAEHPKTHVTHHPVSDHEATLRCWALGFYPAEITLTWQWDGEDQTQDTELVETRPCGDGTFQKWAAVVVPSGEEQRYTCHVQHEGLPEPLTLRWEP

SEQ ID NO: 361 - protein, 276 aa, Artificial sequence
  synthetic sequence
GSHSMRYFSTSVSWPGRGEPRFIAVGYVDDTQFVRFDSDAASPRGEPREPWVEQEGPEYWDRETQKYKRQAQADRVNLRKLRGCYNQSEDGSHTLQRMFGCDLGPDGRLLRGYNQFAYDGKDYIALNEDLRSWTAADTAAQITQRKWEAAREAEQRRAYLEGTCVEWLRRYLENGKETLQRAEHPKTHVTHHPVSDHEATLRCWALGFYPAEITLTWQWDGEDQTQDTELVETRPCGDGTFQKWAAVVVPSGEEQRYTCHVQHEGLPEPLTLRWKP

SEQ ID NO: 362 - protein, 276 aa, Artificial sequence
  synthetic sequence
CSHSMRYFDTAVSRPGRGEPRFISVGYVDDTQFVRFDSDAASPRGEPRAPWVEQEGPEYWDRETQKYKRQAQADRVNLRKLRGCYNQSEDGSHTLQWMYGCDLGPDGRLLRGYDQSAYDGKDYIALNEDLRSWTAADTAAQITQRKWEAAREAEQWRAYLEGTCVEWLRRYLENGKETLQRAEHPKTHVTHHPVSDHEATLRCWALGFYPAEITLTWQRDGEDQTQDTELVETRPCGDGTFQKWAAVVVPSGEEQRYTCHVQHEGLPEPLTLRWEP

SEQ ID NO: 363 - protein, 276 aa, Artificial sequence
  synthetic sequence
CSHSMRYFYTAVSRPGRGEPRFIAVGYVDDTQFVQFDSDAASPRGEPRAPWVEQEGPEYWDRETQKYKRQAQTDRVSLRNLRGCYNQSEAGSHTLQRMYGCDLGPDGRLLRGYNQFAYDGKDYIALNEDLRSWTAADTAAQITQRKWEAARTAEQLRAYLEGTCVEWLRRYLENGKKTLQRAEHPKTHVTHHPVSDHEATLRCWALGFYPAEITLTWQRDGEDQTQDTELVETRPCGDGTFQKWAAVVVPSGEEQRYTCHVQHEGLPEPLTLRWGP

SEQ ID NO: 364 - protein, 276 aa, Artificial sequence
  synthetic sequence
CSHSMRYFYTAVSRPGRGEPHFIAVGYVDDTQFVRFDSDAASPRGEPRAPWVEQEGPEYWDRETQNYKRQAQTDRVNLRKLRGCYNQSEAGSHIIQRMYGCDLGPDGRLLRGHDQLAYDGKDYIALNEDLRSWTAADTAAQITQRKWEAAREAEQLRAYLEGTCVEWLRRYLENGKETLQRAEHPKTHVTHHPVSDHEATLRCWALGFYPAEITLTWQRDGEDQTQDTELVETRPCGDGTFQKWAAVVVPSGEEQRYTCHVQHEGLPEPLTLRWEP

SEQ ID NO: 365 - protein, 223 aa, Artificial sequence
  synthetic sequence
PPCPSCPAPEFLGGPSVFLFPPKPKDTLMISRTPEVTCVVVDVSQEDPEVQFNWYVDGVEVHNAKTKPREEQFNSTYRVVSVLTVLHQDWLNGKEYKCKVSNKGLPSSIEKTISKAKGQPREPQVYTLPPSQEEMTKNQVSLTCLVKGFYPSDIAVEWESNGQPENNYKTTPPVLDSDGSFFLYSRLTVDKSRWQEGNVFSCSVMHEALHNHYTQKSLSLSPG

SEQ ID NO: 366 - protein, 7 aa, Artificial sequence
  synthetic sequence
  MISC_FEATURE (1)..(2): The amino acids from positions 1 to 2 may be repeated at least once
  MISC_FEATURE (3)..(7): The amino acids at positions 3 to 7 may be repeated at least once
GSGSGGS

SEQ ID NO: 367 - protein, 4 aa, Artificial sequence
  synthetic sequence
  MISC_FEATURE (1)..(4): The amino acids at positions 1 to 4 may be repeated at least once
GGGS

SEQ ID NO: 368 - protein, 4 aa, Artificial sequence
  synthetic sequence
GGSG

SEQ ID NO: 369 - protein, 5 aa, Artificial sequence
  synthetic sequence
GGSGG

SEQ ID NO: 370 - protein, 5 aa, Artificial sequence
  synthetic sequence
GSGSG

SEQ ID NO: 371 - protein, 5 aa, Artificial sequence
  synthetic sequence
GSGGG

SEQ ID NO: 372 - protein, 5 aa, Artificial sequence
  synthetic sequence
GGGSG

SEQ ID NO: 373 - protein, 5 aa, Artificial sequence
  synthetic sequence
GSSSG

SEQ ID NO: 374 - protein, 5 aa, Artificial sequence
  synthetic sequence
GSSSS

SEQ ID NO: 375 - protein, 20 aa, Artificial sequence
  synthetic sequence
GSSSSGSSSSGSSSSGSSSS

SEQ ID NO: 376 - protein, 25 aa, Artificial sequence
  synthetic sequence
GSSSSGSSSSGSSSSGSSSSGSSSS

SEQ ID NO: 377 - protein, 5 aa, Artificial sequence
  synthetic sequence
GGGGS

SEQ ID NO: 378 - protein, 10 aa, Artificial sequence
  synthetic sequence
GGGGSGGGGS

SEQ ID NO: 379 - protein, 15 aa, Artificial sequence
  synthetic sequence
GGGGSGGGGSGGGGS

SEQ ID NO: 380 - protein, 20 aa, Artificial sequence
  synthetic sequence
GGGGSGGGGSGGGGSGGGGS

SEQ ID NO: 381 - protein, 25 aa, Artificial sequence
  synthetic sequence
GGGGSGGGGSGGGGSGGGGSGGGGS

SEQ ID NO: 382 - protein, 30 aa, Artificial sequence
  synthetic sequence
GGGGSGGGGSGGGGSGGGGSGGGGSGGGGS

SEQ ID NO: 383 - protein, 35 aa, Artificial sequence
  synthetic sequence
GGGGSGGGGSGGGGSGGGGSGGGGSGGGGSGGGGS

SEQ ID NO: 384 - protein, 40 aa, Artificial sequence
  synthetic sequence
GGGGSGGGGSGGGGSGGGGSGGGGSGGGGSGGGGSGGGGS

SEQ ID NO: 385 - protein, 45 aa, Artificial sequence
  synthetic sequence
GGGGSGGGGSGGGGSGGGGSGGGGSGGGGSGGGGSGGGGSGGGGS

SEQ ID NO: 386 - protein, 50 aa, Artificial sequence
  synthetic sequence
GGGGSGGGGSGGGGSGGGGSGGGGSGGGGSGGGGSGGGGSGGGGSGGGGS

SEQ ID NO: 387 - protein, 5 aa, Artificial sequence
  synthetic sequence
AAAGG

SEQ ID NO: 388 - protein, 8 aa, Artificial sequence
  synthetic sequence
LEVLFQGP

SEQ ID NO: 389 - protein, 7 aa, Artificial sequence
  synthetic sequence
ENLYTQS

SEQ ID NO: 390 - protein, 5 aa, Artificial sequence
  synthetic sequence
DDDDK

SEQ ID NO: 391 - protein, 4 aa, Artificial sequence
  synthetic sequence
LVPR

SEQ ID NO: 392 - protein, 22 aa, Artificial sequence
  synthetic sequence
GSGATNFSLLKQAGDVEENPGP

SEQ ID NO: 393 - protein, 9 aa, Artificial sequence
  synthetic sequence
  MISC_FEATURE (6)..(10): The amino acids from positions 6 to 10 may be repeated 1, 2, or 3 times.
GCGGGGGGS

SEQ ID NO: 394 - protein, 6 aa, Artificial sequence
  synthetic sequence
CHYSEL

SEQ ID NO: 395 - protein, 9 aa, Artificial sequence
  synthetic sequence
GILGFVFTL

SEQ ID NO: 396 - protein, 9 aa, Artificial sequence
  synthetic sequence
HPVGEADYF

SEQ ID NO: 397 - protein, 276 aa, Artificial sequence
  synthetic sequence
CSHSMRYFDTAVSRPGRGEPRFISVGYVDDTQFVRFDSDAASPRGEPRAPWVEQEGPEYWDRETQNYKRQAQADRVSLRNLRGCYNQSEDGSHTLQRMYGCDLGPDGRLLRGYDQSAYDGKDYIALNEDLRSWTAADTCAQITQRKLEAARAAEQLRAYLEGTCVEWLRRYLENGKETLQRAEPPKTHVTHHPLSDHEATLRCWALGFYPAEITLTWQRDGEDQTQDTELVETRPAGDGTFQKWAAVVVPSGQEQRYTCHMQHEGLQEPLTLSWEP

SEQ ID NO: 398 - protein, 10 aa, Artificial sequence
  synthetic sequence
GCGGSGGGGS

SEQ ID NO: 399 - protein, 7 aa, Homo sapiens
  misc_feature (1)..(7): Xaa can be any naturally occurring amino acid
XXXXXXX

SEQ ID NO: 400 - protein, 7 aa, Homo sapiens
  misc_feature (1)..(7): Xaa can be any naturally occurring amino acid
XXXXXXX

SEQ ID NO: 401 - protein, 7 aa, Homo sapiens
  misc_feature (1)..(7): Xaa can be any naturally occurring amino acid
XXXXXXX

SEQ ID NO: 402 - protein, 7 aa, Homo sapiens
  misc_feature (1)..(7): Xaa can be any naturally occurring amino acid
XXXXXXX

SEQ ID NO: 403 - protein, 7 aa, Homo sapiens
  misc_feature (1)..(7): Xaa can be any naturally occurring amino acid
XXXXXXX

SEQ ID NO: 404 - protein, 276 aa, Artificial sequence
  synthetic sequence
CSHSMRYFDTAVSRPGRGEPRFISVGYVDDTQFVRFDSDAASPRGEPRAPWVEQEGPEYWDRETQKYKRQAQADRVSLRNLRGCYNQSEDGSHTLQRMSGCDLGPDGRLLRGYDQSAYDGKDYIALNEDLRSWTAADTAAQITQRKLEAARAAEQLRAYLEGTCVEWLRRYLENGKETLQRAEPPKTHVTHHPLSDHEATLRCWALGFYPAEITLTWQRDGEDQTQDTELVETRPCGDGTFQKWAAVVVPSGQEQRYTCHMQHEGLQEPLTLSWEP

SEQ ID NO: 405 - protein, 7 aa, Artificial sequence
  synthetic sequence
  misc_feature (1)..(7): Xaa can be any naturally occurring amino acid
XXXXXXX

SEQ ID NO: 406 - protein, 7 aa, Artificial sequence
  synthetic sequence
  misc_feature (1)..(7): Xaa can be any naturally occurring amino acid
XXXXXXX

SEQ ID NO: 407 - protein, 7 aa, Artificial sequence
  synthetic sequence
  misc_feature (1)..(7): Xaa can be any naturally occurring amino acid
XXXXXXX

SEQ ID NO: 408 - protein, 7 aa, Artificial sequence
  synthetic sequence
  misc_feature (1)..(7): Xaa can be any naturally occurring amino acid
XXXXXXX

SEQ ID NO: 409 - protein, 7 aa, Artificial sequence
  synthetic sequence
  misc_feature (1)..(7): Xaa can be any naturally occurring amino acid
XXXXXXX

SEQ ID NO: 410 - protein, 7 aa, Homo sapiens
  misc_feature (1)..(7): Xaa can be any naturally occurring amino acid
XXXXXXX

SEQ ID NO: 411 - protein, 7 aa, Homo sapiens
  misc_feature (1)..(7): Xaa can be any naturally occurring amino acid
XXXXXXX

SEQ ID NO: 412 - protein, 7 aa, Homo sapiens
  misc_feature (1)..(7): Xaa can be any naturally occurring amino acid
XXXXXXX

SEQ ID NO: 413 - protein, 7 aa, Homo sapiens
  misc_feature (1)..(7): Xaa can be any naturally occurring amino acid
XXXXXXX

SEQ ID NO: 414 - protein, 7 aa, Homo sapiens
  misc_feature (1)..(7): Xaa can be any naturally occurring amino acid
XXXXXXX

SEQ ID NO: 415 - protein, 7 aa, Homo sapiens
  misc_feature (1)..(7): Xaa can be any naturally occurring amino acid
XXXXXXX

SEQ ID NO: 416 - protein, 7 aa, Homo sapiens
  misc_feature (1)..(7): Xaa can be any naturally occurring amino acid
XXXXXXX

SEQ ID NO: 417 - protein, 7 aa, Homo sapiens
  misc_feature (1)..(7): Xaa can be any naturally occurring amino acid
XXXXXXX

SEQ ID NO: 418 - protein, 7 aa, Homo sapiens
  misc_feature (1)..(7): Xaa can be any naturally occurring amino acid
XXXXXXX

SEQ ID NO: 419 - protein, 7 aa, Artificial sequence
  synthetic sequence
  misc_feature (1)..(7): Xaa can be any naturally occurring amino acid
XXXXXXX

SEQ ID NO: 420 - protein, 7 aa, Artificial sequence
  synthetic sequence
  misc_feature (1)..(7): Xaa can be any naturally occurring amino acid
XXXXXXX

SEQ ID NO: 421 - protein, 7 aa, Artificial sequence
  synthetic sequence
  misc_feature (1)..(7): Xaa can be any naturally occurring amino acid
XXXXXXX

SEQ ID NO: 422 - protein, 7 aa, Artificial sequence
  synthetic sequence
  misc_feature (1)..(7): Xaa can be any naturally occurring amino acid
XXXXXXX

SEQ ID NO: 423 - protein, 7 aa, Artificial sequence
  synthetic sequence
  misc_feature (1)..(7): Xaa can be any naturally occurring amino acid
XXXXXXX

SEQ ID NO: 424 - protein, 7 aa, Artificial sequence
  synthetic sequence
  misc_feature (1)..(7): Xaa can be any naturally occurring amino acid
XXXXXXX

SEQ ID NO: 425 - protein, 7 aa, Artificial sequence
  synthetic sequence
  misc_feature (1)..(7): Xaa can be any naturally occurring amino acid
XXXXXXX

SEQ ID NO: 426 - protein, 7 aa, Artificial sequence
  synthetic sequence
  misc_feature (1)..(7): Xaa can be any naturally occurring amino acid
XXXXXXX

SEQ ID NO: 427 - protein, 7 aa, Artificial sequence
  synthetic sequence
  misc_feature (1)..(7): Xaa can be any naturally occurring amino acid
XXXXXXX

SEQ ID NO: 428 - protein, 7 aa, Artificial sequence
  synthetic sequence
  misc_feature (1)..(7): Xaa can be any naturally occurring amino acid
XXXXXXX

SEQ ID NO: 429 - protein, 7 aa, Artificial sequence
  synthetic sequence
  misc_feature (1)..(7): Xaa can be any naturally occurring amino acid
XXXXXXX

SEQ ID NO: 430 - protein, 7 aa, Artificial sequence
  synthetic sequence
  misc_feature (1)..(7): Xaa can be any naturally occurring amino acid
XXXXXXX

SEQ ID NO: 431 - protein, 7 aa, Artificial sequence
  synthetic sequence
  misc_feature (1)..(7): Xaa can be any naturally occurring amino acid
XXXXXXX

SEQ ID NO: 432 - protein, 7 aa, Artificial sequence
  synthetic sequence
  misc_feature (1)..(7): Xaa can be any naturally occurring amino acid
XXXXXXX

SEQ ID NO: 433 - protein, 7 aa, Artificial sequence
  synthetic sequence
  misc_feature (1)..(7): Xaa can be any naturally occurring amino acid
XXXXXXX

SEQ ID NO: 434 - protein, 7 aa, Artificial sequence
  synthetic sequence
  misc_feature (1)..(7): Xaa can be any naturally occurring amino acid
XXXXXXX

SEQ ID NO: 435 - protein, 7 aa, Artificial sequence
  synthetic sequence
  misc_feature (1)..(7): Xaa can be any naturally occurring amino acid
XXXXXXX

SEQ ID NO: 436 - protein, 7 aa, Artificial sequence
  synthetic sequence
  misc_feature (1)..(7): Xaa can be any naturally occurring amino acid
XXXXXXX

SEQ ID NO: 437 - protein, 7 aa, Artificial sequence
  synthetic sequence
  misc_feature (1)..(7): Xaa can be any naturally occurring amino acid
XXXXXXX

SEQ ID NO: 438 - protein, 7 aa, Artificial sequence
  synthetic sequence
  misc_feature (1)..(7): Xaa can be any naturally occurring amino acid
XXXXXXX

SEQ ID NO: 439 - protein, 7 aa, Artificial sequence
  synthetic sequence
  misc_feature (1)..(7): Xaa can be any naturally occurring amino acid
XXXXXXX

SEQ ID NO: 440 - protein, 7 aa, Artificial sequence
  synthetic sequence
  misc_feature (1)..(7): Xaa can be any naturally occurring amino acid
XXXXXXX

SEQ ID NO: 441 - protein, 7 aa, Artificial sequence
  synthetic sequence
  misc_feature (1)..(7): Xaa can be any naturally occurring amino acid
XXXXXXX

SEQ ID NO: 442 - protein, 7 aa, Artificial sequence
  synthetic sequence
  misc_feature (1)..(7): Xaa can be any naturally occurring amino acid
XXXXXXX

SEQ ID NO: 443 - protein, 7 aa, Artificial sequence
  synthetic sequence
  misc_feature (1)..(7): Xaa can be any naturally occurring amino acid
XXXXXXX

SEQ ID NO: 444 - protein, 7 aa, Artificial sequence
  synthetic sequence
  misc_feature (1)..(7): Xaa can be any naturally occurring amino acid
XXXXXXX

SEQ ID NO: 445 - protein, 7 aa, Artificial sequence
  synthetic sequence
  misc_feature (1)..(7): Xaa can be any naturally occurring amino acid
XXXXXXX

SEQ ID NO: 446 - protein, 7 aa, Artificial sequence
  synthetic sequence
  misc_feature (1)..(7): Xaa can be any naturally occurring amino acid
XXXXXXX

SEQ ID NO: 447 - protein, 7 aa, Artificial sequence
  synthetic sequence
  misc_feature (1)..(7): Xaa can be any naturally occurring amino acid
XXXXXXX

SEQ ID NO: 448 - protein, 7 aa, Artificial sequence
  synthetic sequence
  misc_feature (1)..(7): Xaa can be any naturally occurring amino acid
XXXXXXX

SEQ ID NO: 449 - protein, 158 aa, Human papillomavirus
MHQKRTAMFQDPQERPRKLPQLCTELQTTIHDIILECVYCKQQLLRREVYDFAFRDLCIVYRDGNPYAVCDKCLKFYSKISEYRHYCYSVYGTTLEQQYNKPLCDLLIRCINCQKPLCPEEKQRHLDKKQRFHNIRGRWTGRCMSCCRSSRTRRETQL

SEQ ID NO: 450 - protein, 141 aa, Human papillomavirus
MHGDTPTLHEYMLDLQPETTDLYCYEQLNYSSEEEDEIDGPAGQAEPDRAHYNIVTFCCKCDSTLRLCVQSTHVDIRTLEDLLMGTLGIVCPICSQKPYSTMADPAGTNGEEGTGCNGWFYVEAVVEKKTGDAISDDENEN

SEQ ID NO: 451 - protein, 817 aa, Artificial sequence
  synthetic sequence
GSHSMRYFSTSVSRPGRGEPRFIAVGYVDDTQFVRFDSDAASQRMEPRAPWIEQEGPEYWDEETGKVKAHSQTDRENLRIALRAYNQSEAGSHTLQMMFGCDVGSDGRFLRGYHQYAYDGKDYIALKEDLRSWTAADMAAQITKRKWEAAHVAEQQRAYLEGTCVDGLRRYLENGKETLQRTDPPKTHMTHHPISDHEATLRCWALGFYPAEITLTWQRDGEDQTQDTELVETRPCGDGTFQKWAAVVVPSGEEQRYTCHVQHEGLPKPLTLRWEGGGGSGGGGSGGGGSAPTSSSTKKTQLQLEALLLDLQMILNGINNYKNPKLTRMLTAKFYMPKKATELKHLQCLEEELKPLEEVLNLAQSKNFHLRPRDLISNINVIVLELKGSETTFMCEYADETATIVEFLNRWITFCQSIISTLTGGGGSGGGGSGGGGSGGGGSAPTSSSTKKTQLQLEALLLDLQMILNGINNYKNPKLTRMLTAKFYMPKKATELKHLQCLEEELKPLEEVLNLAQSKNFHLRPRDLISNINVIVLELKGSETTFMCEYADETATIVEFLNRWITFCQSIISTLTGGGGSGGGGSGGGGSDKTHTCPPCPAPEAAGGPSVFLFPPKPKDTLMISRTPEVTCVVVDVSHEDPEVKFNWYVDGVEVHNAKTKPREEQYNSTYRVVSVLTVLHQDWLNGKEYKCKVSNKALPAPIEKTISKAKGQPREPQVYTLPPSREEMTKNQVSLTCLVKGFYPSDIAVEWESNGQPENNYKTTPPVLDSDGSFFLYSKLTVDKSRWQQGNVFSCSVMHEALHNHYTQKSLSLSPG

SEQ ID NO: 452 - protein, 813 aa, Artificial sequence
  synthetic sequence
APTSSSTKKTQLQLEALLLDLQMILNGINNYKNPKLTRMLTAKFYMPKKATELKHLQCLEEELKPLEEVLNLAQSKNFHLRPRDLISNINVIVLELKGSETTFMCEYADETATIVEFLNRWITFCQSIISTLTGGGGSGGGGSGGGGSGGGGSAPTSSSTKKTQLQLEALLLDLQMILNGINNYKNPKLTRMLTAKFYMPKKATELKHLQCLEEELKPLEEVLNLAQSKNFHLRPRDLISNINVIVLELKGSETTFMCEYADETATIVEFLNRWITFCQSIISTLTGGGGSGGGGSGGGGSGGGGSGSHSMRYFSTSVSRPGRGEPRFIAVGYVDDTQFVRFDSDAASQRMEPRAPWIEQEGPEYWDEETGKVKAHSQTDRENLRIALRAYNQSEAGSHTLQMMFGCDVGSDGRFLRGYHQYAYDGKDYIALKEDLRSWTAADMAAQITKRKWEAAHVAEQQRAYLEGTCVDGLRRYLENGKETLQRTDPPKTHMTHHPISDHEATLRCWALGFYPAEITLTWQRDGEDQTQDTELVETRPCGDGTFQKWAAVVVPSGEEQRYTCHVQHEGLPKPLTLRWEAAAGGDKTHTCPPCPAPEAAGGPSVFLFPPKPKDTLMISRTPEVTCVVVDVSHEDPEVKFNWYVDGVEVHNAKTKPREEQYNSTYRVVSVLTVLHQDWLNGKEYKCKVSNKALPAPIEKTISKAKGQPREPQVYTLPPSREEMTKNQVSLTCLVKGFYPSDIAVEWESNGQPENNYKTTPPVLDSDGSFFLYSKLTVDKSRWQQGNVFSCSVMHEALHNHYTQKSLSLSPGK

SEQ ID NO: 453 - protein, 807 aa, Artificial sequence
  synthetic sequence
GSHSMRYFSTSVSRPGRGEPRFIAVGYVDDTQFVRFDSDAASQRMEPRAPWIEQEGPEYWDEETGKVKAHSQTDRENLRIALRAYNQSEAGSHTLQMMFGCDVGSDGRFLRGYHQYAYDGKDYIALKEDLRSWTAADMAAQITKRKWEAAHVAEQQRAYLEGTCVDGLRRYLENGKETLQRTDPPKTHMTHHPISDHEATLRCWALGFYPAEITLTWQRDGEDQTQDTELVETRPCGDGTFQKWAAVVVPSGEEQRYTCHVQHEGLPKPLTLRWEAAAGGDKTHTCPPCPAPEAAGGPSVFLFPPKPKDTLMISRTPEVTCVVVDVSHEDPEVKFNWYVDGVEVHNAKTKPREEQYNSTYRVVSVLTVLHQDWLNGKEYKCKVSNKALPAPIEKTISKAKGQPREPQVYTLPPSREEMTKNQVSLTCLVKGFYPSDIAVEWESNGQPENNYKTTPPVLDSDGSFFLYSKLTVDKSRWQQGNVFSCSVMHEALHNHYTQKSLSLSPGGGGGSGGGGSGGGGSAPTSSSTKKTQLQLEALLLDLQMILNGINNYKNPKLTRMLTAKFYMPKKATELKHLQCLEEELKPLEEVLNLAQSKNFHLRPRDLISNINVIVLELKGSETTFMCEYADETATIVEFLNRWITFCQSIISTLTGGGGSGGGGSGGGGSGGGGSAPTSSSTKKTQLQLEALLLDLQMILNGINNYKNPKLTRMLTAKFYMPKKATELKHLQCLEEELKPLEEVLNLAQSKNFHLRPRDLISNINVIVLELKGSETTFMCEYADETATIVEFLNRWITFCQSIISTLT

SEQ ID NO: 454 - protein, 123 aa, Artificial sequence
  synthetic sequence
VYDFAFRDLGGGGSGGGGSGGGGSIQRTPKIQVYSCHPAENGKSNFLNCYVSGFHPSDIEVDLLKNGERIEKVEHSDLSFSKDWSFYLLYYTEFTPTEKDEYACRVNHVTLSQPKIVKWDRDM

SEQ ID NO: 455 - protein, 123 aa, Artificial sequence
  synthetic sequence
RAHYNIVTFGGGGSGGGGSGGGGSIQRTPKIQVYSCHPAENGKSNFLNCYVSGFHPSDIEVDLLKNGERIEKVEHSDLSFSKDWSFYLLYYTEFTPTEKDEYACRVNHVTLSQPKIVKWDRDM

SEQ ID NO: 456 - protein, 123 aa, Artificial sequence
  synthetic sequence
CDSTLRLCVGGGGSGGGGSGGGGSIQRTPKIQVYSCHPAENGKSNFLNCYVSGFHPSDIEVDLLKNGERIEKVEHSDLSFSKDWSFYLLYYTEFTPTEKDEYACRVNHVTLSQPKIVKWDRDM

SEQ ID NO: 457 - protein, 124 aa, Artificial sequence
  synthetic sequence
LCVQSTHVDIGGGGSGGGGSGGGGSIQRTPKIQVYSCHPAENGKSNFLNCYVSGFHPSDIEVDLLKNGERIEKVEHSDLSFSKDWSFYLLYYTEFTPTEKDEYACRVNHVTLSQPKIVKWDRDM

SEQ ID NO: 458 - protein, 227 aa, Artificial sequence
  synthetic sequence
DKTHTCPPCPAPELLGGPSVFLFPPKPKDTLMISRTPEVTCVVVDVSHEDPEVKFNWYVDGVEVHNAKTKPREEQYNSTYRVVSVLTVLHQDWLNGKEYKCKVSNKALPAPIEKTISKAKGQPREPQVYTLPPSRDELTKNQVSLTCLVKGFYPSDIAVEWESNGQPENNYKTTPPVLDSDGSFFLYSKLTVDKSRWQQGNVFSCSVMHEALHNHYTQKSLSLSPGK

SEQ ID NO: 459 - protein, 325 aa, Artificial sequence
  synthetic sequence
STKGPSVFPLAPCSRSTSESTAALGCLVKDYFPEPVTVSWNSGALTSGVHTFPAVLQSSGLYSLSSVVTVPSSNFGTQTYTCNVDHKPSNTKVDKTVERKCCVECPPCPAPPVAGPSVFLFPPKPKDTLMISRTPEVTCVVVDVSHEDPEVQFNWYVDGVEVHNAKTKPREEQFNSTFRVVSVLTVVHQDWLNGKEYKCKVSNKGLPAPIEKTISKTKGQPREPQVYTLPPSREEMTKNQVSLTCLVKGFYPSDIAVEWESNGQPENNYKTTPPMLDSDGSFFLYSKLTVDKSRWQQGNVFSCSVMHEALHNHYTQKSLSLSPGK

SEQ ID NO: 460 - protein, 246 aa, Artificial sequence
  synthetic sequence
HKPSNTKVDKRVELKTPLGDTTHTCPPCPAPELLGGPSVFLFPPKPKDTLMISRTPEVTCVVVDVSHEDPEVKFNWYVDGVEVHNAKTKPREEQYNSTYRVVSVLTVLHQDWLNGKEYKCKVSNKALPAPIEKTISKAKGQPREPQVYTLPPSRDELTKNQVSLTCLVKGFYPSDIAVEWESNGQPENNYKTTPPVLDSDGSFFLYSKLTVDKSRWQQGNVFSCSVMHEALHNHYTQKSLSLSPGK

SEQ ID NO: 461 - protein, 383 aa, Artificial sequence
  synthetic sequence
PTKAPDVFPIISGCRHPKDNSPVVLACLITGYHPTSVTVTWYMGTQSQPQRTFPEIQRRDSYYMTSSQLSTPLQQWRQGEYKCVVQHTASKSKKEIFRWPESPKAQASSVPTAQPQAEGSLAKATTAPATTRNTGRGGEEKKKEKEKEEQEERETKTPECPSHTQPLGVYLLTPAVQDLWLRDKATFTCFVVGSDLKDAHLTWEVAGKVPTGGVEEGLLERHSNGSQSQHSRLTLPRSLWNAGTSVTCTLNHPSLPPQRLMALREPAAQAPVKLSLNLLASSDPPEAASWLLCEVSGFSPPNILLMWLEDQREVNTSGFAPARPPPQPRSTTFWAWSVLRVPAPPSPQPATYTCVVSHEDSRTLLNASRSLEVSYVTDHGPMK

SEQ ID NO: 462 - protein, 276 aa, Artificial sequence
  synthetic sequence
VTSTLTIKZSDWLGESMFTCRVDHRGLTFQQNASSMCVPDQDTAIRVFAIPPSFASIFLTKSTKLTCLVTDLTTYBSVTISWTREENGAVKTHTNISESHPNATFSAVGEASICEDBDWSGERFTCTVTHTDLPSPLKQTISRPKGVALHRPBVYLLPPARZZLNLRESATITCLVTGFSPADVFVEWMQRGEPLSPQKYVTSAPMPEPQAPGRYFAHSILTVSEEEWNTGGTYTCVVAHEALPNRVTERTVDKSTGKPTLYNVSLVMSDTAGTCY

SEQ ID NO: 463 - protein, 353 aa, Artificial sequence
  synthetic sequence
ASPTSPKVFPLSLCSTQPDGNVVIACLVQGFFPQEPLSVTWSESGQGVTARNFPPSQDASGDLYTTSSQLTLPATQCLAGKSVTCHVKHYTNPSQDVTVPCPVPSTPPTPSPSTPPTPSPSCCHPRLSLHRPALEDLLLGSEANLTCTLTGLRDASGVTFTWTPSSGKSAVQGPPERDLCGCYSVSSVLPGCAEPWNHGKTFTCTAAYPESKTPLTATLSKSGNTFRPEVHLLPPPSEELALNELVTLTCLARGFSPKDVLVRWLQGSQELPREKYLTWASRQEPSQGTTTFAVTSILRVAAEDWKKGDTFSCMVGHEALPLAFTQKTIDRLAGKPTHVNVSVVMAEVDGTCY

SEQ ID NO: 464 - protein, 222 aa, Artificial sequence
  synthetic sequence
ADPCDSNPRGVSAYLSRPSPFDLFIRKSPTITCLVVDLAPSKGTVNLTWSRASGKPVNHSTRKEEKQRNGTLTVTSTLPVGTRDWIEGETYQCRVTHPHLPRALMRSTTKTSGPRAAPEVYAFATPEWPGSRDKRTLACLIQNFMPEDISVQWLHNEVQLPDARHSTTQPRKTKGSGFFVFSRLEVTRAEWEQKDEFICRAVHEAASPSQTVQRAVSVNPGK

SEQ ID NO: 465 - protein, 327 aa, Artificial sequence
  synthetic sequence
ASTKGPSVFPLAPCSRSTSESTAALGCLVKDYFPEPVTVSWNSGALTSGVHTFPAVLQSSGLYSLSSVVTVPSSSLGTKTYTCNVDHKPSNTKVDKRVESKYGPPCPSCPAPEFLGGPSVFLFPPKPKDTLMISRTPEVTCVVVDVSQEDPEVQFNWYVDGVEVHNAKTKPREEQFNSTYRVVSVLTVLHQDWLNGKEYKCKVSNKGLPSSIEKTISKAKGQPREPQVYTLPPSQEEMTKNQVSLTCLVKGFYPSDIAVEWESNGQPENNYKTTPPVLDSDGSFFLYSRLTVDKSRWQEGNVFSCSVMHEALHNHYTQKSLSLSLGK

SEQ ID NO: 466 - protein, 227 aa, Artificial sequence
  synthetic sequence
DKTHTCPPCPAPELLGGPSVFLFPPKPKDTLMISRTPEVTCVVVDVSHEDPEVKFNWYVDGVEVHNAKTKPREEQYNSTYRVVSVLTVLHQDWLNGKEYKCKVSNKALPAPIEKTISKAKGQPREPQVYTLPPSREEMTKNQVSLTCLVKGFYPSDIAVEWESNGQPENNYKTTPPVLDSDGSFFLYSKLTVDKSRWQQGNVFSCSVMHEALHNHYTQKSLSLSPGK

SEQ ID NO: 467 - protein, 227 aa, Artificial sequence
  synthetic sequence
DKTHTCPPCPAPEFEGGPSVFLFPPKPKDTLMISRTPEVTCVVVDVSHEDPEVKFNWYVDGVEVHNAKTKPREEQYNSTYRVVSVLTVLHQDWLNGKEYKCKVSNKALPASIEKTISKAKGQPREPQVYTLPPSREEMTKNQVSLTCLVKGFYPSDIAVEWESNGQPENNYKTTPPVLDSDGSFFLYSKLTVDKSRWQQGNVFSCSVMHEALHNHYTQKSLSLSPGK

SEQ ID NO: 468 - protein, 227 aa, Artificial sequence
  synthetic sequence
DKTHTCPPCPAPELLGGPSVFLFPPKPKDTLMISRTPEVTCVVVDVSHEDPEVKFNWYVDGVEVHNAKTKPREEQYASTYRVVSVLTVLHQDWLNGKEYKCKVSNKALPAPIEKTISKAKGQPREPQVYTLPPSREEMTKNQVSLTCLVKGFYPSDIAVEWESNGQPENNYKTTPPVLDSDGSFFLYSKLTVDKSRWQQGNVFSCSVMHEALHNHYTQKSLSLSPGK

SEQ ID NO: 469 - protein, 227 aa, Artificial sequence
  synthetic sequence
DKTHTCPPCPAPEAAGGPSVFLFPPKPKDTLMISRTPEVTCVVVDVSHEDPEVKFNWYVDGVEVHNAKTKPREEQYNSTYRVVSVLTVLHQDWLNGKEYKCKVSNKALPAPIEKTISKAKGQPREPQVYTLPPSREEMTKNQVSLTCLVKGFYPSDIAVEWESNGQPENNYKTTPPVLDSDGSFFLYSKLTVDKSRWQQGNVFSCSVMHEALHNHYTQKSLSLSPGK

SEQ ID NO: 470 - protein, 275 aa, Artificial sequence [sequence omitted]

SEQ ID NO: 471 - protein, 9 aa, Artificial sequence
  synthetic sequence
KLPQLCTEL

SEQ ID NO: 472 - protein, 9 aa, Artificial sequence
  synthetic sequence
LQTTIHDII

SEQ ID NO: 473 - protein, 9 aa, Artificial sequence
  synthetic sequence
VYDFAFRDL

SEQ ID NO: 474 - protein, 9 aa, Artificial sequence
  synthetic sequence
FAFRDLCIV

SEQ ID NO: 475 - protein, 9 aa, Artificial sequence
  synthetic sequence
KFYSKISEY

SEQ ID NO: 476 - protein, 9 aa, Artificial sequence
  synthetic sequence
ISEYRHYCY

SEQ ID NO: 477 - protein, 9 aa, Artificial sequence
  synthetic sequence
TLHEYMLDL

SEQ ID NO: 478 - protein, 9 aa, Artificial sequence
  synthetic sequence
YMLDLQPET

SEQ ID NO: 479 - protein, 9 aa, Artificial sequence
  synthetic sequence
QAEPDRAHY

SEQ ID NO: 480 - protein, 9 aa, Artificial sequence
  synthetic sequence
RAHYNIVTF

SEQ ID NO: 481 - protein, 9 aa, Artificial sequence
  synthetic sequence
CDSTLRLCV

SEQ ID NO: 482 - protein, 10 aa, Artificial sequence
  synthetic sequence
LCVQSTHVDI

SEQ ID NO: 483 - protein, 9 aa, Artificial sequence
  synthetic sequence
LLMGTLGIV

SEQ ID NO: 484 - protein, 8 aa, Artificial sequence
  synthetic sequence
TLGIVCPI

SEQ ID NO: 485 - protein, 12 aa, Artificial sequence
  synthetic sequence
LLMGTLGIVCPI

SEQ ID NO: 486 - protein, 9 aa, Artificial sequence
  synthetic sequence
VYDFAFRDL

SEQ ID NO: 487 - protein, 9 aa, Artificial sequence
  synthetic sequence
CYSLYGTTL

SEQ ID NO: 488 - protein, 9 aa, Artificial sequence
  synthetic sequence
EYRHYCYSL

SEQ ID NO: 489 - protein, 9 aa, Artificial sequence
  synthetic sequence
KLPQLCTEL

SEQ ID NO: 490 - protein, 9 aa, Artificial sequence
  synthetic sequence
DPQERPRKL

SEQ ID NO: 491 - protein, 9 aa, Artificial sequence
  synthetic sequence
HYCYSLYGT

SEQ ID NO: 492 - protein, 9 aa, Artificial sequence
  synthetic sequence
DFAFRDLCI

SEQ ID NO: 493 - protein, 10 aa, Artificial sequence
  synthetic sequence
LYGTTLEQQY

SEQ ID NO: 494 - protein, 10 aa, Artificial sequence
  synthetic sequence
HYCYSLYGTT

SEQ ID NO: 495 - protein, 10 aa, Artificial sequence
  synthetic sequence
EVYDFAFRDL

SEQ ID NO: 496 - protein, 10 aa, Artificial sequence
  synthetic sequence
EYRHYCYSLY

SEQ ID NO: 497 - protein, 10 aa, Artificial sequence
  synthetic sequence
VYDFAFRDLC

SEQ ID NO: 498 - protein, 10 aa, Artificial sequence
  synthetic sequence
YCYSIYGTTL

SEQ ID NO: 499 - protein, 9 aa, Artificial sequence
  synthetic sequence
VYCKTVLEL

SEQ ID NO: 500 - protein, 9 aa, Artificial sequence
  synthetic sequence
VYGDTLEKL

SEQ ID NO: 501 - protein, 10 aa, Artificial sequence
  synthetic sequence
LTNTGLYNLL

SEQ ID NO: 502 - protein, 9 aa, Artificial sequence
  synthetic sequence
DLQPETTDL

SEQ ID NO: 503 - protein, 9 aa, Artificial sequence
  synthetic sequence
TLHEYMLDL

SEQ ID NO: 504 - protein, 9 aa, Artificial sequence
  synthetic sequence
TPTLHEYML

SEQ ID NO: 505 - protein, 9 aa, Artificial sequence
  synthetic sequence
RAHYNIVTF

SEQ ID NO: 506 - protein, 9 aa, Artificial sequence
  synthetic sequence
GTLGIVCPI

SEQ ID NO: 507 - protein, 9 aa, Artificial sequence
  synthetic sequence
EPDRAHYNI

SEQ ID NO: 508 - protein, 9 aa, Artificial sequence
  synthetic sequence
QLFLNTLSF

SEQ ID NO: 509 - protein, 9 aa, Artificial sequence
  synthetic sequence
FQQLFLNTL

SEQ ID NO: 510 - protein, 10 aa, Artificial sequence
  synthetic sequence
AFQQLFLNTL

SEQ ID NO: 511 - protein, 275 aa, Artificial sequence; identical to SEQ ID NO: 46
  synthetic sequence
